United States Patent Application Publication US 2022/0167576 A1 - sequence listing, part 10

SEQ ID NO: 30 - DNA, 35937250 bp, Oryza sativa (residues 19,025,605-21,139,560 of 35,937,250)
  misc_feature (5969519)..(5970518): n is a, c, g, or t
  misc_feature (13681864)..(13682863): n is a, c, g, or t
  misc_feature (13684155)..(13684254): n is a, c, g, or t
  misc_feature (18795366)..(18796365): n is a, c, g, or t
  misc_feature (24815509)..(24816508): n is a, c, g, or t
  misc_feature (35936251)..(35937250): n is a, c, g, or t
aaaactttcaagtcaagatttaaaaactttcaactcggatttgaaagctttcaattcaaacttgaaaactttcaacttggatttaaaaactttcaactcggatttgaaaactttcaattcaaacttgaaaacgttcagctcggatttgaaaactttcaacttggatttgaaaacttccaattcagacatgaaaactttcaactcggattcaaaaactttcaaacgaagatttgaaactttcaattcaaatttttttaaaaaattcatgtcaatatttaaaaacttaactcaggtttgaaaacttttaattcaaatttaaaaacttcttttaactcaaatttgaaaactttcacctcaaaattcaaaatattcgacttagatttgaaaacttccatcttaaaattcaaaacattcaacttaaatttaagaaactttcaactcaaattcaaaactctcaattgatattgaaggtgaaagattgaatttataaaatatcgcaaaaaactcatgcgcgtgtgtggagaaaaaaaaagaagcaaatccaaaaaaatattcgaaaaaacagaaagaaaaggaaactgacgtaaaaataggagattgaaacgtagggatgccagcaactagcgcgcgtgctagctcctctcctggcgcgcacgcgcgtgctagtagcccccatatataaaccctgcaaatatagtccatagaaggccaaaaaagcccaacccaccaaaaaaagctactaaaccctagcctctgccttatctctttctcagtctctccccatatcctctcccctcccgtgagacacacaggcggcggcgcagcagggcgcactggatctcgccgtcgccggccaccatctcccctcccctcctctccagtctcccgtccggcgtccagcctcacgaatcatgtcccctccacgactccagctcaccctccggagtcagcaaggggcggcggcggcggggaggcgagacaggcaagggcgcgacgatgggacaggcgcggacggcgaggttgtggcggccggcgagacaggcaagggcacggcgaggggacaggtgtggccggcgaggttgcagcgcacatgcgcggtcgcggcgaggggacaggcacggcggcggccggcgattcacggcgagcttcacctacgcacaggcggagattcacagagagtgagaggtattgctccatctccaagactccaattgtgccttgtgattttgtgaatgaaactgtgcccatgatatttttgtgtatatttggtagatttagtagtacatagcacatagtagcagaatccaatgcggggccccgctcatccatggtcggcgccgagggcggggggtgaagtcggggattggggttgggagcgttccagcccaacccggccctgccccgccccgttgccatccctattctccttacctttgggtgggggcggcttgcgagtatgacaacggttcagctacggccgcccctctttctctttgtctggcgaactcgccatgatagtgatgtttgggatgtgttggaacgagtagcgagccgacgatcgataaagagaggaataacaaccgaacaacgcatcttaatctaatttaattgtaactgcttcagcaatcgaggcatttatctagcgtattatacttgtactagtcttgaacatcaggattgaaagaaaaaagaaaggtagcaatgactcatctagcccaaagcgaaattgtttgctgaaacctgctccattgccaaacttaggcaaggaatcctgcaacaacgtgcaacggtacgattcactctttacccttaaataaacctacatatccttggaaacaaaaactaaacatgcattacgtaaggataattcccgtatttcatcaacaataaatcaatcatccaataaatattaaagggtgaatagctaaagtggtcctccaagtttcatcaaggctcagtttagtccttaatgtttcattctgtacatattagtccttcaagtttttattttaattcaaacttatccttaatgtttcgcatggctaaatataaccagcaactctcttgataaatgacacttatagcccctcattcacatatataagagaaaaaattgcttccaatgaattgtttttttaggtaatacatagtaatttatgtaaaacgaaaataaaatatgtacttgcaagtgtatacagtagctattaggctcaagttttatgtgcacatgttgaaatatgggaagtacatatctaatgttatttattcatcttgttttctcttttctaatgtgtaattgtatataaattaagggcaaaaggtacattttctaacagaattgttgactagaaatagtcatatggcatattaagtgggccaaaggatgattttaaaccaaaacaaatacttagatgacctatatatgtagacaaaatgaaacatgaagaaccaaattgagcttttggtgaaacttgagggactaaattagttattcacccaatattaaatatcggcatatattattcttcattaattattaggtaacataacatttatattgaccatgttataaaagaccaccacaagaagtcacgtcattttttatatcatggatatcccatcacaacgcgttggtgtcatctaattttaaaaggaaacctatcttactataaaattacatctttaaggtcctgtttggcgtagctttagttcccatcttcaacttacctaaagctagagctgtgccaaacagtacagattttttattttttggagcggacttagcagggatgctccacaaatttgtactacgagggtggagctttgttgctccactccacctcaaaagacccactgcactttaattttttagtgtatttacacaaaatgccactgaactaccccttcctacccctcttctcacgttctctctcctctccatcttcctccccatcctcctcccgacagccagctgcggcggcagtgtctgtatcggcagtggcaagcagcagcgtgtcgatggtggccggcggtggcggcgggtgagatgcgatcgcgagggcaatagagtgatggcgtcagcggtggcatgcggggtcagcaggtgtcggtaggcggcgcacacgcggcgtcggcacgtggggttagtgacggtaggcggtgttggcggcagcgtgcatcggagacacgtgggctgaccagctagggtggctcgcgactgcccgatagcacggtgcgcgggctgaccggctgaggtggctctgggctgcccaacgacacgatgtgcgggctgaccggcggtagcaatagcagggtgacgcctacgaggcgttccacgaaatggcgatgagggatgtggtggtgtgaagctgagtaatctagccaaacactttctatacccacctcagctcctataggagccagctctcactggagttggagtttagagttgggagttgaagtttggagccctaccaaacggagcctaagtcctaagctcaacattaaaaaattctacatcatcattcactaacaattattacattttaaacatcatacaagcatgttatattatttataatttattgaattttagagctttaaaatgcaagcatattaaatcatcatcccgcaatattcacataatatttcaatatatctttcctatcattttgtttataatatcctatatacatatatagtccatcatcacttagttaacactatttctctcttttctcattaagccatatcacaacagttatttttagcctttaaatgattaattgatgttccaaattatctctctccttttcttctctcattaaagcaaatcacctcaattatttctagtccttagatgattaatctatagctcaaattatctccctccttttcttctctcataaagccacatcaccttgtttttacatttgaaccatcattctttatacttttcaaattatcgtaaatcacataaacttatgtcgtctagatatcttacacgttatttctacttattgttattatcctagacttcctcagcatggggtttcacctacactgcatgcaacagacatgcaaaaaaaaaaaaccagttctgacctagaactacacttggaaaataggggagacagactagctaaaacaaacatctccaaagcattgtgctggtcttctgaaagatttcaattgcaaattcacttttctttagtcatttcatttgccccaatcctgaacagatttcacactagccagtgaagatgagacaatcgtgctcgatcaccaagccgaggtggctgatgctgttgggataagttgccttagggtgaggatgagggggggggggggggggcatgacaacatgaggttgtggtctgtggaggatagtaccgctccatggtcatagtttgtctgaaattacttttgatgctaataatatgtttgtgtgcttatttttttagataatggaaatggattacatctccggtttctgtcataagacacacaaccataagtttaatagtaataaaaaggtaagataaaaataaatcaaaatgagaaataaggtgatgggacaaatccccaactccactttattattgactagcgttaaaccacataaaattttttagctagcaattcttataaaactacgccacccatagtggaataagagacccttggctaccgattccaagagtgtagctccattgcgcatagtatccttctcctcctgtggtagcattgtagactaaaagtggagccagtaggaagacatgaagataacctgcatagggttagataattgtttaccattaaaaactttattattgcgacaacgccaaattgaccaacatacagcactagctccaatttgaatcatcttcttgatggacctagatacccctctaagccaattaccaaaaatgtttttggcattacggggtggggggatattaaaagcaaaaaacacacatctccaaacaaactgagcgacaggacactcaaagaaaagatgttggattgtctcttgtgcatagcagaaagaacaatgtttgtctcccccccccattttcttttagccaggttatctttcgttagaattactttcttgtgaagaaaccacataaagaccttgatctttagtggaattttcaagtcccacagaattctctttttgatccgaacattatagttcatgatcgcggtatacatagatttgacggaaaattgaccattcttatggagcgaccatacaaagcagtccttttcatttgacagagttatattagctagcctgaggatcaaatcgttccactcgattagcttttggccaacaatagctcttctaaaagagatatttagcggcgttgtgctcatgacctctgccacagtagactgcttctttcgagccacattatataatgtagggtattgatctttgaaagcacgcgatcccaaccacgtgtcttcccaaaatcttatgttgtcccattgccacatctaaaagaaccaaatctaagaaattggtctttgactttcattaaaccggcccaaaactgagaaatacctatcttgctggacataccagaaagaggtttaccctttaagtatttatttcgcaaaaggtattgccataggccttcaccattaaataaatggaaaagccatttgcttaataagcaactattttttatatcaaggttatggacacctagtccaccttgatcttttggtcttttttatatcaaggtttgtgtgcttattgaattacaatgctgtgatccatcaagtgagtgatacaatataggataaattcagtcttatatgatagattaagattgaaccaccactcaccttcaatacagaacatgccaattaacacataagtataagacacccctaaatttacatcgaaactattcataaaggaagattgccctacacgctgccattgtaaacatgaatgaataaagctggatcatgatcacttggaaagaatccaacagcacaaacaacagagctaaaacactcaaatcaagcacgaggtgcttgctttataccataaagagcacgattgagatggaaaatataattggcaggggcatcaacaccaggtgtaaacctcctcctttaggtcaccatgaagaaaaccattctttacatccatttgagatatggtccaggaacgagcagctgccacagctacaagagtacgaacagtggccatgtgagcaaccagagcggaagtttcatcataatcacgaccatgttcttgctaaaaaccgcgagcaactaagcgagctttgtagcgctcaatagagccatcggagcgagtcttcaccttaaacacccacttgcaagtaattggaatggcatgacaaggaagaggaacaatatcgcaggttcttgttcgctttaaggcagcaagctcctctgtcatagccaattgccacttaggaatggcagcagcctcttgatatgtactaggctcctgaacaccatcaattgttgcacacatatagcgaggatgaggcattatcttgctgcgatctcgaagaccatatcgtggtgtaccagactgtggtgataacacaagtggataatcaatgagcggagcaacaggtcgatcatcagattaaacattaatggtactagttggaacatctgaaggaagacaagtgggaggctgagactcatgtggagttcgaggtcgacgactatagtgcaaagtaaaaggtgacatctctgaccttggtgtttgggtggatgatggtatatccaaagagggagaaggaatggaagatggaaaatgtgtctcactgatggtggttaggtcttgagaaggaataggtggaagatggagaaaagagatggactcctgaggagatgaggaggaagatattttagagtagaaatatggacgatcctcaatgaaaatgatatctcgagatatgcgagtacgacaagaagaggggtcataacaacgatactctttatgttcaatactatagccaagaaaaacacactcaactgattgagctgacaacttggtgtgctctcaaggtgccaaaagagcatagcaagtacaaccaaaaacactgttgacggtcgttagcgatcagtttcgcctgtcaatactaccaaaataaaagaaaactagtcatgcttgcaatgcatatttgtgtttaattaataaatattctactagcactaggattactaacctcttgcagagaatgaacataaaatggaggagaatcgacataaaaaacatgcaatcaatcaatcagacgatgtcgaggatcagacttatggaaagatgggccaagaactcagaaattacacgaccaattgggccaaaattcagaagtctataaaatatcaagagaggaggccgctagccgaagatgggctggattgggccggcccctggttcggccgaaccctccctggtaacgttggatgcagggtttcttctggatggcgtggatcactccccaatgacggctggagggcaattccgaccattccaactgccacaaccgtcattggcagcctatttaagaagctcctcttctcactttctccacacacctcaagcaagaagcttcatacatctctcaagtttagtatagtctctagagtatagtggaatagaaatataatagaatcttcagtcctcggagtcttcggaagaattcgggtatggcactctagtaccttttccttcttttgtaagacttgtactttatttagaatactcttctttatactactttggtattgtactactttctaagtatatgaataccaactttattatatatccaagttatattcattatgatgctagcttatctgggaggtgcaatggtgtgggtataatgatcgtatttacgatgactatgtcatgacgatgatattagagtagtatttggtaatttaagcgtggtgtttagattactagatatcattatttgaggttatatgttgcggaagcaaggtgggccgctgatggtgacagctcagtacgggtattcctccgcgcgtttatatagtcctaagttaatttcctagggagggtactccttcgtatttagccccggttggatggtcacgacgaattgtcgtaagcaactcgacaatcaggggtggcttctcgaaacaccaggagggcatcggaaagagggtattagctaagtaatcatatagctaggatgtatgtatactagaaatataggaatagaatctttctatattatttccacttagcttagataattatgaatgagagtacaaatgcttctacttaatgtcactctacccctttgaattatattaacccctgcatagactttggttattacaagtaatatataaattattagtacggttctctctattgtaatcttcccacgagattaaacaaatacgataccattggaatactctcgggtgaaatgctacaatggtatatctgtgcgcttgtggatgaactctgaaaccataatataccagaagtatttctgcgccattgctggaaattatatttctagtaatgtcgttaagaaataccaacaaacacgatgatgatcataacatggggaagatccaaatagaacctctcctggacactttccttgaaggcgagatgatggctgaatattgatgagataaacagcaatgggaacagcctcagcccaaaaatgagaaggtacaaatgatgcaatcaatagagtgtgggcagtctcaatgatatgccggtgcttgcgctcagcaacaccattttgaggatgggcaccagggcaagagaactgaggaagagtacactcggaagaaagaagttgtcgaaaagcagctgagaggtactcccctcctgaatcagaatgaaaaatacgacatagtaaatccaagtgtatctcgaataatcatctataaatatgacatagtatttgtgtccacccttagaagcaaatggggcagggtcccatacatcagaatgaacaaggtcaaacggacaactagtcctagaattactaatagggtacggtagttgtatctgttttccaagtttacaacccgtacaatcaaaagtagtatcaatagagacatgacctagaacatcctgatgaattaaagttgaaaggcggaacccacaaagatgccccaatctatgatgccattgtggaaaagttgcagaagatgcataacccatggctgcagaactagtggtggaggagccaaaagatgaaggtggaagactcaagtgatcgagaacatagagcttcccattagagctgctgtggcgatggccagtaccaacaagtgctcttgtctgaggatcctgcacgaagcaagaggtattatcaaaatccacaaaatagttcatgtctgtgagttgtccagtccaacagaaatgagattcatggaaagttgtggcacaagagaaacatttggtacagtgagttgagaagtggaaagagtgccaaacaggatgcgccattagctatctgaacacatgtaccattgataactggttgacaggatgcaagctgagacacatctgatgtcatataaaagaggatcctgagtctaacacccatgactgagaagtacctggtgcaggggacaaagaagctgacacaccaggttgataagcactcatgtagggctgactggttgaagttgcactaattgaagctgcagtcacagttggagcagcaagtgtaactgaagtactaggggcatggcgagatgcaccacgcttggccctaaactaagccaacagttcaggatgtagcttgaagcatttctgaacacggtgaccagacctcttgcaatctgagtggaagaagttgctaaggcccatgctagaaagcacgatcaccagacaagaaggttcccatcaatgaagaattaaggacagtgtgatgcggtgttgtggagttgggaagtgactgtagacaagtttcctcggcaattaagtctgcgagagccttagccatggtaggaagagtagatcgaccaagaagctacaccctaatagtttcaaagtctgaccgaagacgcatcacaaaatcaaacataaggctctgatcctcatatttctccttgcatatacactgtctgcacccacctccagcctttggcaccattgttatgtaattagcttactgtagccatcaggttttgtcactactctctgtaggctttactgggttatgtgcttgtgtaggcttgatgggtatttgggccttgggctgttgtgtgtgtgttttgcgacgtgccgtgctgggccggtggacgcgtcgctgattgagttgccttgtacctataaaagggaactctcttgtctgagagagatatgaaaaaagaaaagagaaatctctatcaacttctttcccaaatagctctgttctatctctcgatctcaaattcttctcgaaactctagatcgaatcctggcgagacgccacagaaatctcagttcgtgacattttggtattagagcctcgatctcgctggcgaggaagaagggtccaaatcttacggagaggatggcggcggcggaaactgagttgggagatctgagtcagaaggtggtgaatctcacaagcaacctcaacaacatcctgggatcactcaccaagctggagacatggattccggcggttgatgtgggaattcaaggtttgaacaatgtggtggaggagatctcagcaagggtgacgaagctggagagcatgctagcgacggcgacgttcgcggcggctcaaacgcccgtaggacccgacaatgttgagaatcaccagggcaacgcatccaaagcccttgtggctcatgagcgaaccctggtcaagggtaagtctcggttgccgatttcccccgtcaatttcgatttgggtgaagcgtctgtgcagagtcagtttagcagtcgatccagtagccctagattgccaaaaactaatttcccaaggtttgatggagataacccaaaactgtggaagaagaactctgaaaaatactttgatatgtaccaagttccctatgatagttgggcaaattttgctactctgcactttgtgggtaatgctgcactgtggttgcaaacttatgaggctttgcatagtgttgagacttggcctgaactttgtgtagtagtgcataataagtttgggaaagataaatatcaggagcacttagaggagttagagagtcttaggcaaaccagtggggttgatgcatattatagcaaatttgaggagttgatgcacagagtcttagtgtataatcaggcttttgatgagacatattttgttaccaaatttgtgggtggccttaaaactgaaatcaaagcagcaatcaagctgcataaacctagaactgttgatgcggctttgtctcttgctaaaacgcaggaagatttggcgttggagataaagaaaggaggtcagaagtccacttataaggaaggatttaaatcaacagctttcagggtaaactaccaaggcaaaggtatactgggacaagctcctgatgacaccaccaagacagaagaaaagccaaagtgggaggattgctttgagtctctcaaggctgccagaaaagcaaagggagaatgttttaagtgtggtgagaaatggggaccaggtcacaaatgtccaaaatatgtccaacttcatgtccttgaggaattattggaagtgtttcaacttcgtgaggatgacgaggtgtgtcagaatgaagaggctgagagtagtgaagaggaacttgttgtctcagaatgtgttgtgtctggaactatgggaaagaagaccatcaggttgcaaggattgatacagaatcatgaagttctgattctcattgattcaggaagctccaacagtttcatttctcaacagttggtggaaaagttggggttggctgttacagatattcctttatctcaggtgataattgcggatggtggggttatgcagtgtgataagttggctataggggtggagtggtggtgtcaaggacacagtttcacaaatgaccttaaggttctgaaactgggtggttatgatatcattttgggaatggactggttggagcatcatagtccaatgtggatacattggcagaggaaaaagcttaggtttacataccagggaaagagaattaatctagttggggtgaaggaaaatttgtctgattgtaaatctgtcacttccaagcagttgaaaggaatgcttaagactggagcagtttcccaagtggttcagttatgctcaattgctgaagaaagtttggagactgaactacccccaactattagtgcagtcttgaaggaatttcaagaacagttcaaggcaccttcaggactaccacctcacaggagttttgaccatagcatacctttactgtcaggatctaaaccagtcaatgttaaaccctacagatatgctcccaagcaaaaggatgagatagagaggcaggttaaggaaatgttgctccagggcatcattaaacccagctcaagcccatttgcttctcctgtgttgctggtgaaaaagaaggatgggacttggagattttgtgtggattacagaggtttgaacgatattacagtgaagaataaatatccaatgctagtggtagatgagttgcttgatgaattatcaggggctcaatggttcacaaagttagacctcagatcgggttaccaccaaattcggttggtccagcaggatgaacataaaaccacctttaagactcatcaagaattgtatgaattcagagtaatgcctttcggattgactaatgcaccagcttctttccaaggactcatgaacacaatctttgacaaaatgatcagaaggaatgtgctggtatttgtggatgacatactagtttacagtaaaactctcgaggaacatgtgcaacatttgagggaagtctttgcagttctgcagcaacacaaattgtttgtcaaggcaagcaaatgttcatttgctaaacaacagttggaatacttgggacacataattggagctcaaggtgtggccacagatccttccgaggtacatgctgttcaagattggctagttccaaggaatctcaaacagctaaggggttttttgggactgacaagctattacaggaagttcataaaaaattatggaattatgaccagacccttaactgcattgctcaagaaaggggtgcctttcaagtgggctgaattgcaacaacaggcatttagtcaagttaagtgggctatggttcaagcacctgtgttggctttaccagatttttcccaggaatttattgtggaaactgatgcttgtgataaaggaattggggctgtgctacttcagaatgggcacccaattgcttatttgagtaaagctttaggggttaaagctcaagcattgttcacttatgagaaagagtgtcttgcaatattgatggcagttaacaaatggagagcttatttacagaacaatgaatttgttatacagactaaccacaagagtcttacacatttgggggaacagaaattgactactagcatgcaacacaaagcattcatcaagttgatgggtttgcaatataagatcagatataaacaaggggcagaaaacagggtggctgatgccttatctaggagggatgcagatgaggagttgtcggcaatctctgttggaagacctaaatggttggaatctgtggttgattggtatgatcaagatgaggaggcaaaacagttgctggctcaactgataatcaatctagtaggggtagaacatttcaccttgactaatggagtaatcaggttctagggaaaaatctggctgggtaagtttgttgaagcacaacatgcagtacttcttgctatgcatgccagtgggctaggaggacattctagaataacagccacctataatagaattaaaaatctattctattggccgggaatgaaaaaagatgtttaccagtatgtgtcatcctgtgacatctgtcagcaagccaaacctgaacattgtaagagtcctggtaaactacagcctttaccaattccagagcaagcttggtcaaccattagcatggattttattgaaggtttacccaagtcagaaggctttgatacaattcttgtagtggttgacaagttctcaaaatttgctaagtttatacctctcatcctttcacagcactacaagttgccacagcttttatcaagaatgtttatgatacatttgggatgccacaggtgataatctctgatcgggacagaattttcacaagtgccttgtggcaagaattgttcaaactagctgatgtcaaactcaacatgagctcttcttaccaccctcaaactgatggacaaactgaacggctgaatcaatgtttggaagcttatctccgttgtaatgtccattcatgtcctaagcgcagtggtctaaatggttatcccaggcccaacactggtataatacatcctttcacagtgctctgaagaaatctccctatgaagtgctctttgcaaggaagccaactccttttggtcttattgatgttggaaaaagtacagtccctgatgtgcaaatttggttgcaaaacagagctcatatgaatgaggttctacatcaacaactgactagagcacaacagaggatgaaacatcaggctgacaagcatcgttctgagagggtttttgcagttggtgacatggtttatttgaaacttcaaccatatgtgcaaatgatagtagcacgaaggagttgtcaaaaactgtgtttcatgtactttggcccctacaagattctggaacgtatcggtgaagtagcttatcggctggatcttctccagagtagccaaattcatccattagtgcatgtgtttttgctcaagaaggtgattcattctggcatacaagtccaggcggatcttcctgaaaactgtgtttctgaagaagctgaggtggttccagaagaaatacttagtcgtcaactcattaagagaggtaattctgcagttccttacgggttaattcgctggactggtttacctgcatcgctggctacatgggagaatctgcgtcaacttcagcttcgttttccaggagctccggcttggggacaagccgtttcttaagtaggggggattgttatgtaattagcttactgtagccatcaggttttgtcactactctgtgtaggctttactgggttatgtgcttgtgtaggcttgatgggtatttgggccttgagctgttgtgtgtgtgtgttttgcgacgtgccgtgctgggccggcggacgcgtcgctgattgagttgccttgtacctttaaaaaggaactctcttgtctgagagagatatgaaaaaagaaaagaaaaatctctatcaatttctttcccaaatagctttgttctatctctcgatctcaaattcttctcgaaactctagatcgaatcctggcgagacgccacagaaatctcagttcgtgacaaccatggaatccaattgtctagacaaggaggtgaaggcactatgaaactcctcaatggacatgccacccagctcaaggctctgcaagttcttgcgaagagaaaagcggagagccgcactgctctattgatagcgttgttgaagatactcccacatcttcttagcagaagaaagatcaatgaaattcgttctaacggggacttcagcgctcatgcacaagaaggccatcacacactcatcattacgccgccaagctgcaattttcttctcatcttccttgtcatgaggtggatcatcattcaagtcagaggccacaccatacgacctgagttgcatacgagcagaggaagtccactcacggtaattttggccattgagttttatatccaacggcaaaagactgacattaccaagtggatctgatgccatggttgcaatctgaaagactgagctgctgctgcacttgaaacacttctactgcactgctgcaccgagctgctgctgctgtaattaggtactgtaatcagcaacaggagatccagcacatggcagatttgttggaaagagccctggtggcaagtgcagtagcaaaggatggaggatgcgggtcctgcaggctgcaactagccaacaccactgcagctagtgcagttggataatgcaaacctcaagcaggagaaaaggcagtcaagcagatccagcaggagaaaaagatgctccggccagaagaagagaggatcaatcccaaaaatcaagtgaccacgaaaaaacagaacacacagcagaaaacttccattgggagaagagaggagggaggacactcgccggagaccaaggccgatgaagagctcgctggcggcggacatcgatgggaatcgcaagagcaaccttgctctgataccatgtgacttgtgctgaatcagtacggtgtattccaggatagcaatagtatatacagcggtgtatgggcctcatgagccaatagtaaataagtctaaggctacattgatatacacatatctaacaaccaccacttccaattaagtggtgaactaatgaattttctttcacatcggtagcaacatgacctatttatcgtaatgttgttctttcacccacacatgaacaagtcgatagtgattgccaacttctactggtaaatcttatcttagcaccacggagtgtcaatctcctcttcctctggtgtccagttcttaattttgtgcttttacagggatgccttattttgtgttcactgctcatattgcaaaccttctgcagtccgcacctatagcttgtgcctaccattttctatctgcaagatgactgattcaatgatattcacatagctacatgaaggcgtccagcggatcttcttgtccatattatgcattggttgtagctatgcaaatattttccatcttactcttttatgcaccgaataatgcctacataaagttctttatgtatgcttttcttaaacaatttcatatatatatatgatggtctgtcatgtttagcataaactagcatagtgaaaagtgaaagagggcgaaatctgtgaattgaacagatatgagaactgttgcaaatactgaaatacacttcatatatatttttctttgtttcctgtttttttagatgtaaaaaacagtgctatctgaacctatgtgtcacgtgacccgacacaagaagatggacgctcaattgacgctatgatctttattacaaggtaggaaatttcctggtaaaaaaaaaaggccttcttcacctcaattacgctatgtagagtcaacatgcatttagcatttactggtcagcaggggcggatccaacgtgggtgcaggggggactcgagtcccccctacacccacaaaacccatggatacccccggagcacccccttcaattttctcaccatgaatgataaactaaaggtccctatatggctggaggttgaagaaactgtgtaattgagccccccaattttttatttttgaatccgcccctgccggtcagtttgcattgtttgtacgctaaaagataaatttgtcatagcagagtgtttgtaaacaagtagaacaatccagaagacttgcgtcaaaaggtcgttatttgtaaacggatgattatacgaaaataatcagttaactcatgaatactaaactaagtgctgagaagaacggataataattcacactaaaaatttgggcacgctcacaccatagacaactgatctggattatctgtatataatatacttagtagcagcacagtaactaacaggtcttttctaccaagattatagtagcagcagaatatacaacactaacaggtgtttctcatactagattcttccgtaggatgaagtagctattgtagaactgtgaaacatcgggattttaaaggtcactctctgtgtctctcataggacatccatagtaccaggagtagtagcagaatatacgtcacatatgagtagcagggccgggagaaggagcagcagaatttacgactagcgaaaggtaagaataagatcgaggacctagcccctcagaaggcctttccacacatcggccggttcctttactgggtgttgtccaagcagcaggacctccctgtgcagcttcaaagctgcagacctcaggcatgacatgaggcgctgcaatactgttgacggctgttaagtacaaaattctcgccgtcagtacctatataaaaccataaaagtaaaacatccaacatagtggtaggatttatttctaaccatttctacgagtgctgatgtatatttgtatgcagaatgcaacccaccaaagttgagatgaaatatacatgaaggatgagaatataacttccatagccaagcctatggagtgttgagcccatttatcttggccaattttcattggaacatatagtgggacccacatgtcagaacaccagagaaagggctagctggatgggctagccagggttcgagcaactggcccaatccaatccagcttcggcatgatggttgtactcctcatcttatgacggttatgagcgttaataccagtggaaaccgtcatcaggaagacacatggcaaagggagaaggaagatgctatttggattctatggagaatattccttagcatctccactctctcaagtcacctccacactataaatacccctctcctcaccctcattcacagacacttgaagcatgagctgaattataagatgctctattgtactttattatatactagattagggagagagtagaggagaagaagtcggaggagttctggagttgtcggtaatccccttcctatttctttgtgctttgttaattactctgattataatagaaatatcttttaagtaatttagttttgcttggtgagaattatctcttggttagttcctaattagcgtgtgggatcatcgttcactatagtccattataatatagtgattgctttagtgagttacaaacactagagtagctattaattgcttagacgcggtgtctaggtagttgattttcggtgtttgctccgcatcccacggtaggtgtgaggtgagtgtagaggtggtgacagccctcaatatgagtgaaatcctccctgtccgggtgcgtggtaaaatgatatctgggagcagcgagctggccagtgctcgaagtaccgcattaggattaaagttgagatttctatagacactatttcttatcggtgaaacctctctatcctttccttatccatagcttcgtgcccttggatgaacctaaaccggagttagcacacacattccctgtgaaaatcgatacctgagaatactcccgggtgaaatgctacatcggtatattctgtacgcttgcagatttatctgtgatcataagaaataccaacaaatatcttgttgtctttgtgttcacggccgagactctggccatctccatggtgagcattgaaatcacattgtagatgcaacatgtgaggccattcttaagatcaacggtctcatctccagtcaaaaagctcccatacaagaagagctgaaaaatgaacattttgaccgttagacagagctaaaggaataacaagaacatcgattaaaactagtcaaaataatgcaggtcgacactgtcatttcagtatagaattaattgtacaatgcatttgttttaaaaaaattgtacaatgttgagaacgattcaatcattgtatactacaagtcaataccagtgtatagaaatcattgatattcatcacgagggtctaatgaaaactcaattaatcaatacaattagtatagaattcattcgttgtacaacattgagaacaaattcaatttatgcaagtggtattcattgtacaattggcaccttgccagaacaaatacgcttatagtgagaacaaattatgctggtactacaataactcataattgtgaagcaggtgcaatacacttgcaaactgtgtagcgcatgttaactgatgctaaaatgacaccaaatatataacattgctatgttggatgttgattagacgattgggacactaggcaacacatattttaacataccaaaaataaacaggcaaatgaagcttcggactttctaatagacccagacacaatgaatattaatgatttctaattttgtgacttgaaaacgtgtggcacatctacatagccttcaaatttttcacagaaatcatactcccgatatcatgatacatcaaaggtctaagtgccaacttgtacacttatattttttcataggtaaatgtaaatcattattcaactcagatgtgcatgactacgtggtttcaaaatcagcgtcaattcaataaacatatctatggtgtgcccttatggcctaaattcacttgtacaaaaacatttctacaagaaacaagtgctttacaagttcttgtactagatcgcaccaaccatgcaagttcatggtaatgagtcagaatggagtcacaaatggcgaaatacacagcaagaataatctggttattgaaactattattgaagcaaaaatagaacaaatataagatattccaaatcagtacaggcacaagtggttgcatattaaccccaaccctgcaaccaacccagttcaatttgatcaagccagcatcaacataatcctatttttgaagcaaaaacacaccaaaaaactaagacattccaaatgagtttgtgcacaaatggttgcagattaatccccatcttcaaccaacctgccaatatcaatttcacagatctcatcccagacttatcaattctcggttctgtgatcgaatagtagatatacattttaatctgtcacgtatcactagaaccctactaaacaacaaccaacacaatctggaattcacagccattaaacaaagaaaaaacacacacaagttgacacatagaaactacaagatgaaagatcaagtactgcagaccaaattaaaccgtacaaaattatcactaggaacctcgtagtacgaaattggtacattctaacaaaaaaaacaaccactaaactaacaatagaatatcgtctgtaacaattgaaacatcatagattgaccacccatggagcaagcagaaaaacccaatctacttctaatcacaaaccgaaaactatcagattgaacacccataacaaaagaaaaaatgcccttcgatcacaaaccaagacctaatagattgacaacccattgatcgaacaaaaaaaacccaattgactcttcgatcacaaaccgaaacctgaaaaattgatcaccgattgatcgaacagagtaacccaaccaggtcttacatcagcaattccccgtcatccaacacatgcatgaaaaaaacaaaaggtaaataaaatgcactctccattcaccaactcttcgaggaagagtaaatcttattccagctctccaatccaacctgaaatcaaaccaccaaaacaatagtaaacctgcaaaacaattccacaaacacaccagcacaattctgccacgccaagaaacacaaaccgacacaaatacaacccattgatggaacagataacctaattgactcttcgatcacaatcctaatcctgacagatttccactcatggatagaaacaaaaaaaatacccaaaatactctttgatcactgattcaccgccatccaacacacgctagaaaactgaacaaggttaaacgcactctccactcagcaacatcttccgctgcctccaacccaacgcaaaatcaaatcaaatcaaaacttagtaaacccacagatcaattctactaacacactggcctgaatccgcccccaattcgccacacggagataactccaacctacactacgcacaaccaaacccagattctactcaaaccacaccacagtaacaaatcgatcaggcaagacaagaacatgtcctactcaaactattccagaccatcaaatgaacaatagaagcaagcgagacaagattttttctagatactgaaaagcatgcggaaaactggtcatacttaccatcgcactgttcttgcaagagaccttctagccaacgctgaagttcttgccaacaagatctacaaaagcactagaaaatagcagcagaaatcaacgagtcccttcccaaaatgataaaccttgagtttcactcgacactcaaggctgttgttggcctgatctttcgatgagaggataagtcgataggatggagtggcgttggcggtccgactacatctatcaagggatgttgcatcttagcaatcattacaccaaatctctatggaatgcacgatcagcccaaccacaagggtaattgttcctgcaagcaatcgagaactagcaagaacaagatgaacaagcaactcaatttgcgaatcaaagatgatggatcagatcaacagaagtagcacaagtggagttcagcaacaagaaatccggggatctaactggtcatgggattaactcggccaagtagcgacgctatactttgatctaaacaaagcccaagtgttcttggcggcggctaaaggtataagaagagggggagaacgaccacaggggtgttggtgtcgtgctctaaccctaggacgcacccctaatgggcccaacttgatatacagcacattgggcccaaatgaggtgacgcaacatcgtggacagaaaagtactcgacagtaaaatgatgattgcagctgctccagatcagatatggacatgggaatggatccatttgaaagtagacttgataagctttccatgaagtacttgcacgcccaaatcggagttcgcatgaagtcgtgccggccgtcagatgttggcgctatcctgcagtccgaatccaccccgcgcgaatcctctccccgtttggatcctccccatcgttcctgagtaaaacaagagtgcacgcatctccggggtataaacaagaagaacatgaattcaagaatgaactcacctgatagttgagttgacgtgcacgagcgcgggtaataggatcatgaagttgtacttgtggggacgtggatgtatcgatggtgttgatgtcctcatcatcctccccttcttgcattggagtcgtcctcgacttaagctcatcttcttctcccaaatacggtttcaaatttgcaatgtgaaatgtgggactaaccccaaaatctacaggcaaatcaagcttatatgcattctcattaatctttgctaatactttaaaaggtccatcagctctaggcatccatttagattttctcaaattaggaaaccattcttttcgcaaacgcaaccaaaccaaatctccaggttcaaaattcaattcctttctatctttgttaccaacaagttgatctgatgctcaatttcacgcaccggtggcagccctggtggtacgtccttgggaaacacatcctaatacttctgcaaaaaattagtgaccacaagaagaaaagagataggcatattctcaaaaggaaacaaggcctctttacaaatgagagcatagcaaatagtgtcactcgtatccaaattgacaatatcagatttagtggcaagcaaacaaggacctttcgatttaatcacattgtccttaccatgttcagatttagaatctttcttgttatgttgtacaagttcttttgctacaatctgattttcacttttagcatgctcaacatttttctctttcttagctctagcaacatcattctcaaaaacagcttcaagagtcataggatgcaacacaattttttttctattatgcacaaaggagtattgattttgttctaccatgatgcaacgtgtttttatcatattgtgaaagtctacccaacagcaaggagcaaggagcaagcatgcataggtacgacatcgcaatcaacaaaatcacagtaataaccaattgcaaaatttaatctcaccaattgtgttaccttaatgcggccactgttgttgaaccactgaatgtagtattagtatgggtagagatgtggttttgtgaaatttactctaaaagaaattaccttctaaaagaaattacctgctacattggcattgtcacattttctaatcagacatacgcaaattctaggatttcattttgtattcaacagtttcaaagcaataatgttgataattccttcatcaagttatactccctccgtccctaaatataagagattttagtgagatatgatacatcctagttcaacgaatatagcctatagcatgtgtcacatcttaactaactaaaagattagtatttttcctttcgtcacaaatttttcatccgtaaatgtctgactgagcggtgccctctctctccgtgtgaacgcaatcgtgtacagcggccaaagaaaaaaaattctgagaggatacaaaattataattggaggacaaatcacaacatcaaaaccgaccgataatcccagaaaatcagtttcccattcgctgttacaagatcgacactacaaagaaatacacaaacaaatcccaaatccctaaaaactaaagcagaagcaccttcttccgcttcatctgtcaacgagcgtccgctctgaacatcccacaaccaatcccaaatcatcacaaatctaacccaaaaactaaatcccaatccaatcggaatcattacaaaatcatcccaaaataaatcaagcacaggagacaatccaataatcacatcacaaaataaatcacacataagatgagagaagaggtggaaatcacaaaataaatcacatcacataggatatgagaggagagagaagggtgagagggaggccgccgccgctcctcgccgccatggagatcctgagccgtgccgcgcctctgcgtcgagaagccgcagctcagccgctgggccgggagacgctgaccagcccctgcgccactgctgcctctggaccaagagggagagggaggggtgagagggaggccgctgccgctcctcgccgtcgtggaggtcctgagccgccgcgccgctgggcagccgctgcgtcgaggagccgcaatgcagccgctgggccgggagccgctaacccgcccctgcgccgctgctgcctctggaccaagagggagagggaggaggaaggcggcgatgaggctgaggaggcgtggccacgtgacgggggccagtggcagtaggtggatgcgacagaggtagggatggtggtggcaaggagatggtgtgcggtggcgctgacggtgggtgggagtgtggcggctgtggtctgtggataaggatggatggatggcgtctgtgagctatggcatgtggggataaggttggctccggttttttaataggagtcggtttttttttaaggaacatacgctacaagatttgtatagattaaaaacgggacctataaatatacaacagatgtcggtttttcaaaaaaaaaaatcttaaccttaactatttaaaaaattcaaaactttctgatcatcacctctctttttttccgtattttcggccgtaagtccgagagtccgtacgtcgtccttccccacttaaacaaaatcaaataaaacgagggaagagggatacaagttcaacacaaaagggatggaatcaaccccataattacaacaagattccacggatctaacatggcggcggcccttatcggcaaggttcttgggtgttgaggtattgagggagcatcaatgaagaaaccgggaggcgattcactacggcggcgactcccatgggtggcgatgtcgaggaagcaggcggctgcagtaacttcaggatgaggccaccagaactcaactgcctccgcgtcctcgagcctcccctgccagtggatccgtcgcccgctagcctcgccactgccctcgagcctccactaacaccagatccaccgcccgcgcgtctcggccatcgtagctaccggtgggccattgccgagaggtcgccagatcctcccctcccatcgccatcgacgacgcatccacgcgagagggaggcggagagacgacaggatccacgcaagcagcaaaggcgacttagagctggtggtcgatttggtcggtgacaacttgggtggaggagggagacagacgaagaaagactggatcatcgccgtccactctcttgcgtcgccggagattggatcggggagagagtaggggagaaaggggatttcatcagccggcgatttcgtcagagatcaaggttttcgtatgcccccttcggccggttatttcatcggtacgggaccgatccaaaccatccatcagatcggacggctcagatcggccctaggtcgggccgccaccactgttgggccacaaaagacaactgggctatgctcagttcgccccgcgttgggccatcaccgttagataggccgctcgccgcgcgatcatctcgtgtgcacgcgctaaacgggccacgccaattttttgggccggttacggaagtaatgggccaaaataagattttatttaatttcgccgatttaattcatttggttatgtacataattttctttggcattattttgagccatttaaaatggttgaaaaattatgatcgattactcagaaaatatatatctatatctatatctaataaaaaaacaaaaacacaaagcttccggtatattttggtccgttgtttttttgttttcgtctggtcttttgtcgctttttttttcccgaatccgaactcctgccgccgcccgggccgaatcctagcacagcgccgccgccatgtcgatcttgcgtttcctcctccaattgattataaaaatcgattctccactcctccctcatcattttctcaagttttccctttcaattcagctttaatttgccggattgaatctcccgtcaccgttgatgacagatcggtgatctttctggtcttttaatcctaaattttacgctctgatattgggaaaacagaaagaacagactagcctatagctaaataagaaggaaggaatgggctttcagtccaaaaccaagaaaactttttcattaacttttaatttatagtgtatagcaattccaatattagaattctcattaactttttcaatcgtaatgtatagcgagagagataagcctatctgaccaggcaaccgatatttttttaaaaaaaactacaattatagtatacttgttaattgcggtcaattttctatagtttgctaatctaccaaattaatttccgttaaaaaataattgttaaggtacacgtacatacttaatagacgagtgatattattttagttattttttttatttttgacatcataatcatcgaaacttttactctaatatttgtttgagataaaaatttccacgaaacacaacatactgaattctatgcgctatatatcatccatgtgtcaccactacgagactatgagtaagtatgtaaaagctggttttattagttttataataaacttacctattttaaatacaagttttttaatcacacaaatttttgtctatgtactcttacgtgaaagtgacctaaggcattcaccgtttgttcctcttatgatataatcattacgctaccgcgttaggaacatagttcatatcatacacatacacgtggaataattgtctaaacaaaaagaaaacctttgtgattaaaaaaatgttcagttaaactttatcaaacataacattgcccggtgcaacgcacgggcattttgctattcccataaaaatcttatatttagggacggaggagtacattaaaatgttactgctcacacacaggaaaatgttgaacatttgacctcagatgggagatgaattcgtctggttttactaagaacattgcttaaccttagcagtcttgtaatgttatcacttgcgtaaaagaaagagaaatctcccgtctcagtcgtctcgtccgctccttgcgccaagacgagtcgcggctgccgatatccatctggcgagcagagcaggggatgggatatttctgattcatctctcactcccaccgggaatagtttaatttggtctgaaatttgctttgcgttcgttaaccccttctcttcgaagcgggccctaaccttaatacaagtagtagtaacagtttcgtttgttcccgcaaatgtttgaaccccccccccccccccccccaatgtcccaagttggactcggatccgcccctgtgacactgacaccgacgcggagacagcgacgcacgcacgaacgcgcgcgcgcttgccataaaaggagcaggcgagcgagcgagcgagacgtcgtctcctcggacatcacgcacgattcacgaagccaaaccacccttcttcatccgatcatcgagcatgccgccaaccagagtccaagattgccgattctcggcggcgccggtggtcgagctttctgatcaatcgacggcggcggcggcggcggcggcgagcatggagatggagcagctcacagcccgcttcaacgacgccgtcgccgtgcgcggcagcaaccagctggcgacgggcatggagatggcggcggcgccggggcggggcgccgatgacgatatggaggagctcgtcgcccggctcgtcgacgtcaccgtgtgcgacgacgggccggcggcgcggggcgaggcggcgtgcgccgtgcgggtccgcctcccggacgggcgcgtgttcgacagggtgttcgacgcggcgcggcccgtggcggcgctgttccgctactgcggcgcggcggtcgccgcgtgcggcatggcggggcggccgttccggctggtgcggctcgccggcggcgcgtcggaggagatcccgccgcgcggagacgcgtcgctgcaggacctgcggctcgaccgctgcatcgtatacgtggtcttctcgccatagcctcgctcgtcgatgcgcgcggctcgccacagaggatcatggcgacatggcggtgtcggctcgccacacagatgttgatgggcggcagtggaagcagagatggattttcttcgtctaggtgacatccttcgtttcttacatgtcatatgaatagtaataaaaaattaaaaattgatgagatagattaatactccttccgtttcaggttataggatgttttgactttggtcaaaatcaagctgctttatgtttgatcaagtttgtagaaaaaaagtagtaaaatttttaacccaagacaaattttttatgaaaatatattcaattattgatttgatgaaactaatttagtattatagctataactatatttgtctatagatttagtgaaacttgaaacggtttagtcaaagtcttaaaacttgaaacggagggagtatgggatatatcatgctacaaatatgtaagatcaaatttaacctctacaagttataaaaaacaaattaaaatttcataattatttcttataacttgtagaagttgaatttaaatctgcatgtctgtggattgatatattttatattaatctatcttgttaatttttaatttttaataactatttagatggcataaaagaaacaagggtattttctcgagggatgaatacactcttccagtggaagaagaggaccctgcccttgctctaacgtagacaaccatagctgtttgttgagatgaattcatctaatgtagcgtagggttccttagacgaatttattcattgtaggcctgaattctttggtttaactcatgtaccattcatttttctatgagacaatcggtcgattattctattaactgttcatatctgttcaaccagtattgttttcttccaaacaaattaattacatatattgcatttaaatataatgcagtatatttaaatttcccatacattggatgataatatattaatccaatggtcatatcactcattcactttgctattgcttactaccaaaatattccgacatacaagagtgtgcgtgcgttttgagtgtctgtgttgtactgtgtaattctaaaaaaaattacatgaaataaacttataagtcataaaatttttaaaattatgtacaatattgcagctaaaatgaattaaaattacacattgcatagcactttaatttcagtcttagcaatgtatatagttttatttagagtaaattttacaaaactacaggtattttgaccaaattatcacaaaactacagatttaagaagttgtatcacaaaactacatatttagcactaaatttatcacaaaactgcagattttaggttaagtatcacaaaaatgcatatttaatattgaacttatcacaaaactacaacttttggagtttaaatccctagcaccattgttatgatggagttataaacattattactttgtgattaaattggttctaaacatgcattttcgtgataatttagttactaaacatgtaattttgtgtcactacatcttaaatgtgtagttttgtgataaattttatgttaaatgtatagttttatgatacaccgagttaaatctatagttttatgataatttgattatagtatctgtagttttgtgaaatttactcttttatttaattggcgtgctagtattttgcctacaaactttgagcttggtaaaatttaaatcaagaggcctctccacatacacttaatgggagacgcagaagtactgatacatgaaatgtaaaaacatgcatgtattttttactttatgtaatacatataattttttccttctaataaaatttatcttaaattaattatctaatctaaaatacgattaccccattatgtttattgcaattaattctttataacaagatcttacatgattatattatggtgaacaaatatttatgtttgtaaattacttttattatatatgtaagttacttttatcagatatataaattacttttagatttgattaaattactccttatgcattcataatgctctgagttaactacttttaattattgtttttagttaaatttataatttgtgctggttaaattgaatttctagatagactcatgtttttatccctacaacagatttacgcctaatattgtaacaacttactttcattttgtgctaagttacttttatgatttatgtaaactaatttcaaactttattgaatttactttcattaatgtatttacttgaaaatattctctatactttgcttatgaatttactccacatagtactttttttcttcaacttagtagtaatacctctaatgttttagagagttacttctattgtatatctaagttacttctacaatttaaataaattacttttaaattaataaaatgtttgaatatatccagcatggatctcgtttttttatatattttgagtagagtacaatgatacaaatagatcttaaaagtaatctgtgatttaaaatatgtaagtcattaaagaggttaaaaaaacatgcatcatagactaaggtgatttatattgagatggagtgatctctggttaagactaacccactaccatgcactacctaatcctttgagctttgacaaaacaatcttagagagaaagaagtagagaacgaatgattaggcccacataacaaacacaatataggccgagttggatagtacaggtttgtaacttattcccttcttacagaaaatgagatagcttaatagcgcgatattaattaaatgttagctaaaaatataaaaatatattaatatgatttttaaaaaaactttccctatgtttttgaaaaatacattatttaactatttggaagtgtttgcgcgaaaaatggagagtataagttagaagaggggagtgttatactcagccataatggagaatgtgcgtgctttaattgacttattagctgtagctgaaatttaaattttagaacttagatttggagttgataattttaagttttttcatcaaacttttatttccaaaattaacttttaaataattaagaacacaaatatataagttttaaccataaaatacttttgatggttttgtttattttttttcattgttatcagtcatagaacgactaattaaaaataatttataaagtttggcagctgtttataaacagctgaatggtacgatgggaggtgtttgtggatgagaaacttatcaactaccaccatatgtctatattgactatgcgggtaaaaccatattaaattggtacaaaatgatggtaagtctggtaccgagacactatgaacgaactttacggggttttgtagttgttaaaaaaactcagcaagtcgaaaggatgatatatagttagaaattgctatatattttagaatgaagtaggtatattttaggacagagatagtgcttaaaaatagcttagaaaaaaatcatctaagaaataccgagtataaatatttccgaagaatcatactattgaaagatccccataagctgaagaagtttattaacacatgtcctaagctccgtatcttgcattgtaaatgaaaagaaaattcatttacctagaaatgaaaaggtacaaatattctccttttttatcaaaaatgcgtctataacatcctaaactttgaaactggatatttaaccgcctaaactatacaatatcgtttatataacaccttaaggtgatttttatttgatttacatatatgttagatgagcttgatcacgtgataaatgaatttgacatatatgttaaaatcttcacctaagattttcgtttcgacacctggtttttctcttacttacaaacggatgttaatataatactagtttgtcatcactatagaataattgattatcaataattgacgatatgctaacatgctatatcagttattcaaaacctttcaaataccccaaaccttgtaggacgtaatctgaacattattacaaagtttcggggtttgaagttcggttctaaagatcaggatgttagatggatttcttgattagggaaaaggggatgtgcaaaactaaaggttgttggtggagccatatgtaagctattgagtcaatcttgaagatttgatttttttttcatttaattcaaaagaaattatactttgaaaagaggtgaacgatttttttttaaaaaaagtagtaactttcatattcatcttaggcaaaatgggggaaaaaaaaggccacgtcacctctcagtgccagctatattatcacctactactgccacctttataaatagcctcctgacttttctggaattcacaaccacacccttcacacatttctcctccgccccctcgcctctgcgagattagcgaatcagcccccctaccaccgcttttccccgcaaagccacgccacgatggcctcctcgcccgccccaccaggacaccacgacgagcgccacgagtccacctccagctccgccgatgacgacgagatcaccgccgcagccgaggccagcccggagcagggcggaggcggaggcggaggccgcggcaccggcggatcgggctccgccgccacggagggcgaccagaagggaaagggaaaggtcgtcgaaggttcgcaagaggtgatggttccctatcttgcgtttgatggcgtttgtgcctggtttcttgggagtatttttggggtgtgggggtttgttcttgagcatttcttggtttcgctggattaggccgccaagaaggacaaggtcgattcccagctaaagaagttcatcaggaggagctttcttgcggtttctgaaggcttcaagaaaaaggtgaggagaggcttgcttgtcattcttggctggcctgggcattcctgtgcagttgtgccatcttttgtgttgggaaggttggatttggatcatgtcgttcctgtgaaatcttggggatcatcttgcgtaggagcaatcctgttgcttagaatacggttcttgtctcagcttgtgtgttgagatgtggaacggttcttgggaaagtttctctactgtttggtctaaattattcatccttcggctgcttggtaactgaaattggctatgaaggctctaaggataattggcaacaaattgcggaacactagttttgtgatcatgcttttatgttgtttaaaatattccttacatcccatgttccctggtttcctagtgtgaaatgttcgattctgatattacttacctgaaattggtgctaaatctgacaatacgcatgaactttaacatgttttcttgtgaattgcttttggattataaaaggaaggcgaatacattgttgaaatgaaattccgaaaagcaaatgtacccacaattatcacttcttgctgatcaccaagatttgactccatttaacccttgatagtgttgaacatgccgtataaatcatgaaaggtcataatgagaatcctagttcacatgatattttgtttattcacaagttccttagtgtgaaaatatgaaatattgaggcacgttatgactgctgttatattttggtgagaaatcgtgaaaccagaagtatgagctttcagttttattggacagtgttgtaaggaaggttttgtctggatgtgtatttgagaattggatcactggtcatggtttctctaaattatagaagccttttatatgcaaactaactgagcatactctagtgtttggtctaaagatccagcctttggctcagttgctgcttggaattgtcccagaagactcataggtcgtagcatcgttgttcatctgttgtttaaaagttccatatattcctattttttttcagaataacatgtattccctattcaacctagtctgaaatgtttgatcttgatatcaattttctgagatgctgcccatgtccggtagaacatatgatcttaacctgttatcttgtaaatagctttcagatagacaaggaaagcaactggatgaggcaagcacgtcaaactcgccacctcatgtggatcacaaggtttgattcctttcaacatttgataatgctgaaacgcaagtgtatgaattatgtaatgtcaggatgatagatcacatgatactgtgtacattcacacttgtacagatagccattcgacagagtatattttcttgtatgcactctaaatcataagttaactcttgattgcagttatgttttgcatgtaattgaaaggatttgccgatttgattgtgatggctacttgaacgttctactactgttgctgaatttaggaaatcttgtgtatctagcccatcttctatgactgaacaacagtcaaacaataaaaatgaagggattattttaattaattttttcaaacatttatcagagaatgtaaaatccagaaactggtgcttagaacataaattacatttcatttttttgtcatgttgctcgctggttcagatcattgatattttttaaattcccttatttgtttgtgaggtgcagaaaattcccatggaagaagctgtgtatcattattttggggacatccataatgttctgaggctatcgaaaagggaaagggagtcagttatcattatgcgcttggtgcctcttcatagtcattattcagcattgaggccagtgtatagagatggggagagtttctacaggagcttcatattttcctacctggtaagtgtccacctctctgttccctagcataggataatgtatgtttagtgtcataaccctctttttttacaggagcaaattgttgatagagtagacatgggtgaggaagatcgccttcttgctgctgttagagaattggctagacgggctgaacattttcagtgggcctctgaatttccccggaggcgcgaagtaatctctcgccttccctatattttgtttttcttgtataaacttgcttgtaatggactgttctttaaaatttgtagtattgcaaggcaggctggatcttttgtcttactttctttgttttatcatttgcaggagatgcagtgtttcacaatattggcattacaccacactcttacaccctgttgacattaattccaattataaatatgtaaagttaatttgacctaattacaacaaatgtacaacctttcgagaaattttgcagttgggcagtattaataataaagtgaaatcacaacatgtcctcttacgttgaagtctgaagtgctgcgaacatggtccttcatggtgtatccatctggtcggctgatcctaaaccacaaatgccgcgccttcttaccactctctcataaaatattctttttattgattatcttagtacttgatgttcaattatggaagcttctcagacaagttatgttagtcatgcttgttcatgtcagattattgatggtcagcgttctgtaagcgtctatgtaacatacaagttaaactcttcagtgggtacaagatgccagctatatgtaatgattgcctaatgggacttatcgtatcattgattcttgcaggcatttgagaagctgatagagaaaataaagggatggaagcgcatgttgcagtacccaacattaagagtcaggtttttgaaacggttagttttcttcaattcctgcataagtgttgtttctaaatatatcccatctcatcccactgattgaagcttcaccttttttttcagctacaacaggggtgaatttctcctcgagttcttcagcagttatgatacaacggatgatagtgagaaaaacaccttaagctcgtgttgtttcaatgtcatcctaattcatggttctgacatatgcattctgcattctgtcctgtcagtttttgctttcctcagattagcagcagcaatctggatgtgctcgcccgaccacataacgatgtatgcaccgggtgtgattgggcctggagaaggtcgcagtctggaagatgttagttgccagcatcacttcccatagagaaacccgtcatgaactgtcaatgcaactatatttgttcttgacactgactgacctgttgctctggttgcatgcagtggtgctcgacacaggttattcctccccgtgtgtatgcagacgaggttgcagtaagagccttggcggctgcacttcaggtgttcatccgagtggaggcgccagaatatggaggtcgccaagatagctactacatcgcccgtgacagaccccgtgtgaccttgttgcgcatggactctcagtatgacattgtctacccactctctcctgagttgattcaccaaagggctaagcgtggaggagcgagcaggttctactgctgcataggtggagattcaaatctgcaacggctgtcgcaacaacaagaagaacgaggaggaggaggtcagtagcatagtgtatctagtcaaggggcagcgagagcgagctggttccactcctgctcaggtggttccaagaagaaacagtcttgagctgatgaagctcatagtaactaggatcgatgaagaataggagatcttctgtttccctgtgaggagaaggaacattaacattgatccttcctgattttttgaggaagatccttcctgaattgtgctctattgatccttcctggagaacaactcaatcgatctttgacatggctttggctcgcgattttgatatgctggtagctgtgatcaaatgaatccacattattgcagttctcatttcttgtctattcttatacatgtgtgtggagttgttttctgtccatccctcatgaattgtccagttttacctcctgggcttgttattgtaccttctgggagttttgaagcgttgcaaatgcaaagataacctcgtactgttttcctactaaagaatcttacttatccgcagtgtttgtgttgtcagctggcctatctggcttaatcatgcattctgagttgtgaacttgcattgtgaattaaataggtgctgttttttctaatcaagaatcttgcttaaccgtagaggagtttatgttgtaacttggccttcgaatactcgtgtcgtgttagaattcgtcctgtaaatttgtagatgaagcttttatcaggaggcgtttgatctggagtcggagaggagcgaggcacgaggcggtgttggcgtgttgttaagaatcttgcttaaacttgtcgcccaatgttttcgctcgaccattgattttttttcttcattaggatgcatttttagagaaaaaaaaattatccgtcagttttttcacacgataaattttatttgcatttacactgtatttaatatatatatatatatatatatatatatatatatatatatatatatatatatatatatatatatatatatatataaaacttaccccgtaacttttaacacttaagctataattatttttttagtacacagtatacaagagaattaagataaataaaaaataatagagctactctatatacaataactattctacacccctcccccattagcccaactaccaagcacatccctccctcccccgatcacgcgcggctccacctccctcctgatccgcgccggccccgccttcccagcgcccgcccccccctcctcctcccagcacctcctccccagcgtgatctctctcctttctcctcctccccatcccgatctctctctctctccttttttccttcctctccatcccgatctctctctctcctttttttccttcgccttttctcctcctcctccccatcccgatctctctctctcccccttcttttttttcttttcttcgttttttctcttttctttgtttttttctctccaatctctcattttcatttctattttctagaaaaattaaaaataaattggtgaattcaaactagaacccatgatctcatggttcataacaaactcccctaaccaatccaccttatgacacgttttgatttaagatcattgttttctttctgtatatatctgttcaaattttaagaacacaaacccgtcatgttactataggaagtcatatcttgttactatgattcggtagtaacattatcgtagaactgcagtaacacgatatgttactgtgaaatttataggccgttactgcgcaatgtataggtcgttactgcacttattgcagtaacatcatgacgaaattatagtaacagagaacatatggtagtaacggtactactgcagtaccactgcttgtgcatagctaaatttaaaatatccatcttgtgcaaaatacaagtgctaaaaaagttcatgtgcatggtcacaagttaacacaagtgctaaaagtacttttctttgtccatacaaagatacgtagtagcaagtttagtacaagtaaacttttagaattctaatatttaaacaataatatctttcacatcgcatattattttttagaaccgttttattgtctcgttgtaacgtcgttttacagcgttgtgagaacggttctaaaagttactacacgatgatcgacacaaaaatgcttttataacgttgttactgcggaaattagtggtgttactgcacattgatcgtcgcgttactacgccgttccagcgacacgagaacttaaaaaaagtaaatcccaatctttagagagcaatatcgcccatgagagaggggggtgtagaatagttattctaggaagtaggggaggggtatatatatatatatatatatatatatatatatatatatatatatatatatatatagtaaatttgtttggtgctccatggtgcccgggcaccattgttgaaattgagtatatacccaattcaaatgagtatgaaactttttcaattacttaggtattaacattaactactttactaactagttcaaagcaagtttgaactgaatttgaacttgtttttgttagattttgattataggtatatagcatccatatatataattagttagatatgtaatcatggattgtgaaataaagttaaatttgagttgttttgttgataagtataggtatgaatcgaattattataactaggtatatactcacaatttgaaaattttgaaaaatttgagtgattttgtgcattagataccatggtgcccgggcaccatggtgccccatatgagtgtcctatatatatatatatatatatatatatatatatatatatatatatatatatatatatatatatatataacacacaccgtaacttttaacacttaagctataattatttttttagtacacagtatacaagagaattaagataaataaaaaataattgattgcctatttaggaaaagagaaagaagagatataaacatataagagagataaaaacacatagggaatcaagtaaaaatatggtcatatttttagcaaaactgatttttctttttttttctttttcctttcggagaaagagaggcacactctgccacttccatcaatagaaatggaagtttaacagacataaaacgttttccaaaatatcggaatatttttaagcttttaggttaaactggttagtgcatgcagataaattattatttttacatataaccctctaagcttttatagttttattggtagtgctcggaagagctagctgctgcagtacaatctatagccgcagccaataaaagcatgtaagccttatatgtaagtccataataatttattgaaataatcttattaaaatatgaagaaatgttaattaatttcacatggtaagagcttattcggtttgttggtttggaggaatttcaattagtagaaataggaaaagttaaggaataggaatgcatgtaacacaccgatccataactttttccaagaagtttaagtgaatggaaaatttcctatgtgtctctctgcaagttgtaggaaagtgacattactttgattttcttattctgtacttacacttctacaaaccgaatgaaactcatataaattaatctttagaaatccaaatactttgtttttcctctaaaattgttggatccatctctgcaaaaacatattgttggatccatttcagaaaacatatactccttgtaaaaagaaaaggccaaactagcaagtactcctacgtgcataccacagcctgctatctttataatagccctcctgcctttctggaattaacaaccacacccttggtacatttctccttagccccctctcatcagaggaattcacgaatagcccccgccactcttccctgaaagccaccatgggcgcgggccatgaaaaaaatagaaattggacattctaccgctgctaagattttgccacaatgccattccgcggaatgacgtcgttaaaatgccactgtcaagactgggcatacatttgttttgccatttggatcatttcattccatttccacctgatttcctacccgggctaccaaaaatgcccttcggtctgccaccaatggcgaccgagctcatggtggcggaggccaaggagaaagaggagctcaccgtggcacgagcttcatgcgccacttctgcttccgctccaccgcgcaggccaggcggccttcctactcctcctggccatctcccccgccaccccactcacccacgcctcctcttgtcctgcttccttcgccgcttccatgtctgatggcaaggtgacggcagcgtcgcggggccaaggggaggcgtcggtagggagaggcggcagcacagctggtgggagaggagtcggcacggtggaggaggtgttttagtccattgaatgagagagggggttattttagtccattgaagtgggaaaaatggtgaaaatcttgtgaaatggccaatatgtcaaagcaacggtttggtatcggttggaaatggcattttaaggatgccatttagcggaatggcgttgtggcgaacccactctcggcagtagcagaatttccaatttctcggcaaaagacgcagtccatggccaacgcccacgcgagcaccagggctcccgcgccgccgcctcatccaccgatgcttcttcggccgccgccgcagcccagggcggcgccgttgcgcccccgccgcctccctcgtccgccgataggcgcaccccgcagcccggagacggaggccgcaccgacggatcgagctccgccgctgcggcggccgatcggaagggaaagaagccgatgtcggcgtctgatgatcggaaacaggtgatggtttctgcctctgcgcttgcgccgtcatggcattttgttcgctcgagcgtttcttgtgagttttttttttttttgggggggggggggggtttctcttgttcttgagcgtttcttggtttccctgaaggcgcgaaggaaggagaagaggaaatctggttacccgaaagagaagttgctcgagagtagcatgcgttcgtatcaaggccccgccaaggaggaggtaaggagaagttttacttttcattcttgactggcctggggctgagcgttcttgtgccatcttccgtgttgggatctttggacttggatcctgtagttcgtgtgaaatcttgggattatcttgcatcgatgcataggcgcaatcttgttgcttaggcacggttcttgtgtcagtttgtatgttggaatggtggagctaggagcttggcattcttgatttctatttaaccatggttgattttactgtgcttcagcgaagaaatcttggttggaattttatggtatcctagaacagagttgaaatcaactaggccttatgacagataaaaaaaaaaaaaactaggcacatgttagggtgccaattcagctttctgtatgtatagcgagtaaactggttctttcttgatatcttcttatggcacttggataaaagaacggcctcctttcctgtcgaaattgttgagacttagttgctcctgcttgcgttaatggatttgctttttaatgcgatgcatttttatcgcactgtaacaatgggtgtgtgtgtgtgtgtaacaatgtggtgttagtaggtgatgtcatgcctgccgtgatattttggtaagaaatcctcaagccaaatttatgagctttcattgtcattgaatggttcatccatatgtgcatttgggaattgggattgcatcactaggatcgtttttctaaattattgaccccttacttggaaaatcacttggcacactctactgttcggtctaaaatattcaacatttggttggttactagccaaaattggcttgatagctcgacgcataattggcaagagtagacaaactgcagacaccagttttgtgattttgctaatcagttcttaaaaatcttcattcatcccctatttctttgtttcctactgtgaaatgtttgatattgatattacttccctgtaattgggtttaagtctggtaatatgtacggattgtaacttgtattgttgtggaatagcctttggataaaaaaggaaggtggacgtggtgacacgctatccaattgaaattccacaaaaagaatatactcacaattgtcacttcacgaggatcaccagatttgactccttttaacctttgataatgttgaaaatgggcatataaattatgactaatgtgatatcatagtaagaaatcctaaagccagacgtatgagatttctgtgttatcagacagtgttataaggaaaattttgtcggtatgtgtatttgggattttgcatcactggacatgatttctctaaatcataggcttccaaactcaccctagtgttcggtctaaaatattcaggcttctgctgggttgctgcctagaattgtatcagaagacccatagttcaattagtaaagagttgacaaattgtcaaagcaccagttctgctagcctgttatttaaccttgtttttagaataccatgtatccctattcaaccttgtttcctcgtctgaaatttttagcccttatattaattctctgcgttgccctcttgtaaatagcattcagacagagaaggagaacaaccgaactctcccagtcaaaattccagatctagcatgtcaaaatcttttcctcaggtgtttcacaaggtttgattctttttaacctagataatgttgaaaatggaagtgtatcaattatcaaatgtcaggatatgatagatcacatgaactgtgtatattcacaagttcatgaagaactagctgttcagcacaatatctttttcgtatgaatactaaatcataagttaaatctggattgaagtgttgttttgcaagcaattggaggagtggattgtgatgtcttttgaataggcctactattcttgctgaatttaggaaatattgtgcatctgttctgtcttttacgactgaagaacaaacaatcactaaaaataaaacgataattttaattatttgtttcaagcatttttcagagaatgtaaaaaccagaaaactggagcataaaacataactacattctagtttagttatgctgttttctggttcagatcattgatatttgaattcccttatgtgtaattgtgtggtgaggtgcagaaacttcctatgggagacgccgtgtattattatttcaaggacatctatgatgctcttcggatagcacaagttggtgtacgtttgatatttcttgatcatgattattcagaatttaggccggttgttccagatgaggagtgcttctataggagtttcatattttcctatctggtaaatgtccacctccctgttccctagcataggatgtatgtttagtgctataattctctttgtttatgacaatgtataacaggagcaagttgttgataggatagacacactttgggaagaccgccttcttgctgctcttagagaattggatagacgagctgaacgttttcagcgggcctctgaattttcccggagacgcaaagtaatctcttgccttccctctttgttttctttccatatatttgttttttctggtgtaaacatgcttgtatttgatgattcttgtaaatttgtagtatacaatccaaattgtatctatgatcttacttcctttgttttatcatttgcaggagatgcacaccgttgttacacaatagtggcatgacatcgcagtgttaattctaacaaatttgtgtagttaattacctgattgaacaaatattcaaccttgcaaaaaaattttgcagttgcacagtactagtaaagaatacaatggagacaaacaaagttatatgtgtcttacgttgatgactgaaatgctgtacacatgctccttcatggtgtggccatctgatcctaagtcttccttcttactactatctcatcaaatattatttcgaatgattatcttcatacttgtactttaactatggaagcttctcaggcgagttatgctagtcatgtttgttcatatccaattattgatgatcagcattctgtaagcgccattgtaagatgctggtaactctttggttgatagatgccagctgtatgcaatgatttattgtatcattgattcttgcaggtatttgtgaagctgattgcgaaaataaagggatggaagcgcatgcgggattacccaccgtcaagagtcaggtttctgaaatgtttggttttatgcaattccttcataagtgtaggttctaaatgcatcccatcctatctcactagctgaacctgcaccctttttcagctacagcagcgtggaatttctcctcgagttcttcagcagttatgattcaacgaatgacagtgagaaaacaccttgagccttcgtttccttcaatctcatcctaattcatggttctgacatgcattcttctttatcagtttttgctttcctcagattagtagcagctacctggatttgcacgcacaaagggagatatggacagcatgtaagagaaggtcaaagtccggaagatgttagtaccatcatcacttcccatagagaggcccgttatgaactggcaatgcaactatatactccctccatctcccaatataagagattttgacattttacttgaattgtttgaccacttgtcttatttaaaaaatttgtgcaaatagaaaaaacgaaaagttatgcttaaagtactttggataataaagtaagttaaaaaaaataataattccaaaatttttttgaataaaacgaatggtcaaacagtgcaagcaaaatatcaaaaggccttatattaggggacggagggagtatatatatatatatatatatatatatatatatatatatatatatatatattctttgagacattcttcacctaactgacctgttgctctggatgcatgcagtggtgctcgatgctggttattcctccccatgcgccggaagaccggatcataccaatagccttagcggaagcactacaatgatggaactagtctagatacgcactacaatgttgcccgtggcacaccccgagtgagcttgctgctcatagagtctagatatggcatcatctacgcactccctcctagtgctgctactcctactagccgtccaaatcagccaaggcctgatcctgtggcgagaccgggattctggtggttcgattgctgctttgttgttcccaaggagagcctcttgcaaggcagcacggcctagccggtcaccagctacagagcaggccaagcaaatcctgcactgactcttcgagagttcaaggcaaggggcagtcttcaactgatgaagctctagttagcacctgggttgatgatgaatgtatacaggccatcataatctgttgtcctgtgaggagtaggaacgtaaacattgatcattcctgaatttgtgctcttaagtaactcgatcgatctttgacatggctttgttgccccccacaggattttgatatgtagataaatgtgatcagatgaatccaaggtattgcggttttcgtttctggtcgatttccatgtgtggagttgatttctgtgcatcctttccttcatcaagtgtgatattcacctgcaggcttaattgtgccttgtgagttgtttacttaattgcactctactatctggtaagcttttactgtttttgtaataagaacgttgcttaccattagtgtttgtgttgtcagttggacatcagctggcttaattgtttacttaatttcgcattgcagattagtattaaataggagatgaaacttgcagggcttttgttcctattaaaagcattgcttcactgtagtgtatcatgttgtcacctgattcagacagcaaatgcagtcagtcctcactgataacaaatttacaatgggaagctcttgttgaccatatttcaacaacatattggatgggctgcaaaaggacaaagagttgggttgcactttaagcctccaaacatcaaagtatatagtgttcttcaagattaggtaccggcagctggatctggagtcgatctgacaaatattttccaagacgagattatataggaatgtctgtaaatttgcaggcttgaagcagccaaaacgagataataggattaagacccaagcatgtttggctggttggaatataatatactccgtaaatctgtatatccatctcgatcatgttgtgatttcgtctgtcaatttggagcatgagcatgagaggcggctcgaatccgactcagaatcggggagaagagcgtggcggtggcgctcgaatccgagtcgggatcagattcctagctcgttataaaatgggcttacaccacctgcgcgccactcccaacgattcgtctctcgtctttcgcgcgcggtagctgtgaatcgccaagccaaccaactgatggtgggaagcgacgacatcgacatggacgacctcatcgcgcagttcatggacatcaccatgtgcgacagtcgacacgccgccgtgtaaaacagcgaaagtgagatgggttgaacgtcgccctttgtttcggtgcgacggctgcgtgttatattggcgcaccaatcggcgctgagattataggattatatagcctctaatctagccgagatttgatctaaaggatatacatcttatctaaactaacaatctaaatctcagctagatcagttaggcaagatatacattaatacatgcatgttgtttaacactccccctcaatctaaacttctaaggttgagattgtgccgaaacagctttaattgtctctctgttaaggactttgtaaatccatccgcaacttgatcttctgaagagataaattcaatttctaggagtttccttgaaacccactcacgcacaaaatgataatccaccccaatatgtttggttctggcatgaaacactggattagcagaaagatattttgctcctaaattatcacaccatacctttgcagcttgaggcgcttgaactctcagttctcgcagcaaggtctgaatccacattaattcggcaatgacattagctaaggccttatattctgcttctgtacttgatcttgacactgttgcttgtttacgggcactccatgaaactaggttagaaccaagataaacagcaaaccctccagtggatcttctgtcatctagataacctgcccaatctgcatcagtgaaaccattaacaagaaatgaaggagatttagtaatcttaagacctaactttgttgtttgctggaaatatctcaggattctctttacagctgcccaatgaactgtggtaggagcatgtagatactggcacaccttatttactaagaatgagatgtcaggtctggttaatgtcagatactgtagtgctcctactatacttctgtaccttgtagcatctccagatgcaagaacttctccttgatgcaaggataatttttctgatactgacataggtgtgcttacaggcttacacttatccatattaactcgtttcagtaaatctgtcacatacttctcttgagacagtattaaaccattacataccttggtggcttctattccaaggaaataatgaaggtctccaagatccttcagagcaaactctttgttcaggtattgtaacagagctgcagtagcactttgcatagaactagcaacaattatgtcatcaacataaaccaagacaaacatagtcactgcacccttattatagaaaaatagagatgtatcagccttggatgcttgaaatcctagttcttgcaattttgtgctcaacctagagtaccatgctctaggggcttgttcaagaccatacaaagccttatctaatttgcaaacatgattaggaagagaagacacctcatatcctggaggttgtctcatataaacctcctcctctaggatgccatgcagaaaagcattgcttacatcaagctgacgaaggctccatcctctagatacagcaatagacagaataactctaattgtagcagctttaacaacaggactgaatgtatcttcatagtctatgccatatctttgtttaaagcccttagcaactagtctagctttatacctgtctagacttccatcagcttttcttttaatcttgtatacccatttacaatctataacatttctacctgattttgctggaacaaggtgtcaagttttattcttcattaaggctatgtattcagagtccatagcatgtttccagttcttatcatttaaagcctcatgaaggttttgtggttcaccagatgaagtaaaacatgagtatttaactgttccatcagtatataccttttccttgcggataccactttgtaaccttgttctgggctttgctgcgaccattgattgatcttttgtggcatgagtggctgcttctcctccaaagtgcatgtcctgcatcacagaggatctcaattcatgcaattgattacctgccaatgtcagatctctgtctccatgtgtggattgactactagtgctatgcaccggagacccactgttgtgtagccgcgtttcgcctcctggttggcgcggcgatgatgagcggcgagtgctggcgccggtggcggacgtgtcatgcgcaggttggtctgttgggtcagtctactgcccaatttccgaagccgaacccaagtctgctgctacgtccacattccctgacgtgcccagatcatcatcagctgtatctgtcgtatttcctccatctatatctgcattctcatcggtctgatcagatgaaacattataaaaatcaagcatatggttgctatgttctcccccttgatgagaagtatgagataaaacatgtgatggtagaagggcaatttcactgcgtagtcttgaacccgcattggagtgaagtttagagaaaggaaaaacattttcatcaaagacgacatctctagaaatatagattcttcccgtggctatgtcaaggcacttatatcctttgtgggtgtggcttgggccaagaaaaacacattgcatggagcggaattgcaatttatgagcattataagggcgaagatttggccaacaagcacaaccaaaaatacggaaagaagaatagttaggtttatggttaaataggcgttttagaggtgtgtcatattgaagaattctggagggaatgcgattaataatatgagtggcagcaagaaaggtttcatcccaatatttaagtggcatagatgcatatgcaagaagagctagaccaacttcaactatgtgtcgatgcttcctttcagctgaaccattttgttggtgagtgtgaggacatgacacatgatgagagattccgattttttcaaaggagtttaatttttgatattctcctccccaatcggtttgcatagctataattttgcgatcaaaaagccgctcaacaagctgctgaaagtcatgaaacttttcaaagacatcagatttatgcttaaggagatatatccaagaaaacttgctatagctatcaatgaagctaaaataaaatttttttcctccaaaagaggtggaggccgtcccccatacatctgaataaataagttctagaggtttattggacacactcaaagaattggaatacggtaattgatggctcttggccttttgacaagcatcacacactgactctttattagattctctaagacacggtaacttatttgaactaatgaccttcataacaatgggaatggaaggatgcccgagccgactgtgccaccgctcaagcgatggagcaactgcaaaggcctgcttggtggatgatgtggacggaagcggatagagaccatggcggcgtggccccttaagaaccgtgctccttgtggttcgatccttaataaaaaatacttagagtgaatttccacaaaaacagagttatcagaggcaagtttagttgctgatataagatttttagcggcctgtggcacatgaagaacattattaagatgtaaaggacgagttggggtatgaactatagcatgaccaatgtgcttgattttcatacctgcaccgctagcggtgtgaatctgatcatgtcccttgtacacctcccgtatgttgagtttctccagttgactagtgatgtgatcggtagcacccgtatcaacataccagttcgagttagcgccatggctgtatgtagctgcggcgacgagtttgtcatctgggacgtagtcttcgtcaaagcgatgccagcaatctgcagcaacgtggccacgtttgtagcacacctggcataaggggcggccgtcgttgccgcgctgttgacttgagccacgcccacggccggagccgcggccgcggttgctgttggtgttccggcctcttcctgcgccaccacgtgaggagaagcccccacggtttctgctggctgcattcgcggagccttgcgtgacgaagcgccaatctgctctcgaagctcaggagctgcgagacagcctctgctactgtgaccgattcagttttggccaccagcgcagagacgactggatcaaagtcttcatccagtccattcaggatatatgcgatcagttcatcgctatccatggacttgcctgctgttgctatctcatctgcaaacgatttcattttaccaacataatcagaaactgaaagattacccttcttcatggtgatgagggccagccgcacgttcatggtttgagcatgcgtttttgctgtgaacatctgctggatcgtcttccaggcttcgcccgtcgttgcggcagtagcgacttgcgccagcgtttccctcgtcatggaggaaaacaggaacccgaggatctgctgatccgctgcaatccattcgtcatgcgctggattggagaatttgacctcctttccttccaccgtcttgctgagttgtgcggcatgtactgccgtttcgccggtgatgtgaccctccaggcgtgcgccacgaatcactatgagaacctgtgctctccagagcgcatgattctgcttgctcaatttctcggagacttgaaccccgaacagcggattggaaactgcggtagaggaggagctggccatctagattgaattggttttctctcgctctgataccatgtaaaacagcgaaagtgagatgggttgaacgtcgccctttgtttcggtgcgacagctgcgtgttatattggcgcaccaatcggcgctgagattacaggattatatagcctctaatctagccgagatttgatctaaaggatatacatcttatctaaactaacaatctaaatctcagctagatcagttaggcaagatatacattaatacatgcatgttgtttaacatgccgctaaccacctcacctcatgccgcggcaacctcgacgacgccctcgccctctacttcgccgccgccgacgagcccgccatccgcccacccatctcgacccgcaccgagaggctctacggcgacgacgacgacgacgaccacgggtatctcacggccacgccaccgccaccggcgccggtgcccgttgtcctcccgccaatgccggtccctgcacgcacggagagcttctttcaagacaccgggtatctcagggccgttctcggcaacagcaacgtggtggaggaggaagacagcgacgcggcgtcggactacggcgaggcggcggagggggaggaggcgtgcagcgtgcgcgtcaggttctcggacaggcgggtggtgcagaaggacttcggcgcggcacgaccggtggaggggctcttccgatactgccaccgccactcggtctcggcggccggcggcgagaggcgggcgttccggctggtgcggttcgccggcgcggcgtcggaggagattcgccggggcgacgccacgttccagcagctgggcctccactgctggaccctgcacctcctcttcgggttcggcccacgggcccatggtgtcggacactgactgagcaactcccgagtccgaccgagacgacgatttcaccctattgtggattatcgaagtagttgttaggagtagtattattattgtctttcgtccacggcgttcctgctgtattcgccaattctttggacatggctagatcgtgcgcgctagcggcatatcgctaaccaacgacgtccttctcttccaaaaaaacagttactagtacactcaacagtacacgcctttttttttcttcctagagagttttctcctaaattacttatccaatctataatccgattacaccattatgatcgttgcaattaaatctttacaacaagatcttatacgattatattctgataaaaaatatctatgttgtaaatacttttattatatatgtaagttacttttgttctatacataaattacttttagatttaagctttttaataacttatatcttttaaatcacgtattattttcatgatctatttacatcattgtactctacataaaatatgagacaaaacaagatccatgttaaatatattcaaatatttcattaatttaaaagtaatttatttaaattgtagtagtaacttagctatgcaatagatgtaacttagctatgcaatagaagtaagttagcacaaaataaaagtaagttgttacaacattagaagtaaattcgagagaaaaatattttgtatctaaaaattaaatttaaagtccataaattatacaattgactaaaaactataataaacataattgacttaaagcattatgaatatataaaaagtaatttagtcaaatctaaaagtaatttatatatatgataaaagtaacttaagtatataataaaagtaatttacaagtataaatattttttatcgtagtataatcatgtaagatctagttttgaagatttaattgtaacgaacacaatagtgtaatcggattatagatcggataagtaatttgagagaaaactttgtaagaaggggaaaaatacatgcatgtgtaatagaaaaaaaggcatgcatgtgcgctggcttctccacggcttttatggttggcgtcgcgcgataagacaatatcgagaggcctcgccgattagtttttgcgcaattcttttgtttctctctcgttgtgagagcaaatttcgaattcaatttgtgtcagattcttacttcgatttgaatttgtgttaaccgcttagaaggttcttaagagaacaaggcatcaagggaagccttgatgaacatgcaccaagtggacttgacaccatgtgccaaattgataggactaggggttatttatttggttgccacactttaccacaccacactttagtcatgccatagttttttaggcatctgtttggttcgctgtcgcaattgtgttatgccacactttcttaactttgggacccacatgtcatgctctcaaatttagagttaagcatgtcacacttgtggcaaactatttataagccacacttatgccaccatatcacaactaacctaaacttagttatggtaaggttaggcatcaatcaaacatcccctaatatttataattatttagcatatactttataagttcaattttgtttgaatctgttacatgttgcaatgcagccattggcctatatttgcataacatcaaatgcttagattcagatgtaatactaccaaacgaggacagcaattaatccaacaaaagttggattaaattttggatactcgtggcatgctttttaaactgctcaacggtgcgtttcgtgcgaaaactttctatataaaagttgttctaaaatatcatattaatatatttttcaagtttgtaataattaaaactcaattaatcacacgttattacaaccttattttacgtgaaacacttaatttttatcttcatctcatattcaggacattcaaacaccaccttagtttggtgcgagggggcaatgggcatggtctatgaggacaggcatcaatactatatactcctttcataaaaaaaactaaattctaaagatgaatctaaacacatatgtgtctaaatttattcttataataaatctttttaggacagagggaatagagatgtagattttcatatgcaggaggaggacggggcgggcattccggttggtgcagttcaccgccgcggcatcggaggagatttgccgaggggacgcgatgttcgaggagctggaccttgcatctcctctttgaactcggcccacgggccaacaatgttggacagtgaaatcatattttcttaaaataagttcatatgaggtccctgttcaacaaaaagtgattttcatcctacaaccgaaaaaccagatacaacggattccttaactgtcaaaactagtgcaaaataagaccaaaggcggtttggacggcggtttcagctaacgtgatgcctgcgtggctaatttggcttggtcttcatctgacgtgacattgacgtggcgcttacgtcgttgtttgatttgggaaataagaaaaaccgtagatctatgtgtcagttacgaaaaaataattaagaaatgatgggcatacgtggcccccaaatgtcattctcatcccatcctttcttcctcctctctccccatctcccttctcttcatctctcccctctctcttctcctttctccaggcgagccccgccggcggcaacgacccaacggtggcccaggacgtggtcaccctgcacgcactcgacaaacagttctacaagaacgtgctccacgccgagtgctgttcacgtcggacgccgcgctactgtcgttcttggcgacggcgaggctggtgcacgccaacgtgcggcacccggtgtcgtgggcaaagaagttcgcaaggacgatggtgaagaatggcgaggattgggctcatggccgcatatatcacaatgttactactccctccgtttcaggttataatacgttttgactttggttaaagttaaactactctaaatttgactaactttatagaaaacaatagtaatatttacaacaccggcatagtttcattaaatctataattgaataatttttcataatatattaatcttgggttaaaaatatttctaactttttctacaaaattagtcaaacttagagtagtttgactttaactaaagttaaaacgtcttataacctgaaacgaaggagtatatgtcaaactcttgtaacatttttgcgagtaacaacaaatgaatagcaatacaaatctgatataaatcaattcatgcgctgatgtataaattcagttcataatcagttcatttttgcgtgcaccgccaccttcgtctccagcttagccacgtgggcagcgtgtctgctgaaaccgccgtctaaactgttttcagacttattttgtaccgattttaacagttgagggacccattattactggtttttgggttgaagaatgaaaatcggattcactaaccgttaagggacctcagatgaacttattcctattttcttcgataacatgatagacacataaatagccactgcacatgtaacaccaccctcgcatctatacggtgaagttagttaagctgtttgtatattcgatttctttcgtctgcaatttgcaacggctttgccatgtgcgttatggtcacgagatcgacgttgtccacttgtggaggcaatcaggcaaaggtagcttaagcttggtgggttaactgtgaaatggaagagtactatagctagtactagcaataatgtttagatgatttttcttttttgctgattagaatttggtactgtttttgtctacgcaatttagggttgatctccacaaattttcgctccgatctcgtgcgccgcgtgcatcacattattctcccgtgtatacattttatatacctttatgaccaagtaaccataccctatatctttatggacgaaatagcattccaaaatgcagaaatttcagtgatcaattcaatacttttacaaactacgaaggctatgtttggatccaaagtttagatctaaacttcagtatttttccatcatatcaacttatcatacacacgtaacttttcagtcacatcatctctaattttaaccaaaatctaaactttggatccaactaaacacagccaaatttgttttctgcgttccaaataggtaaaatgaaggcaagcaaatgcaagcgtccacatgtcttcaagcccaattaatgccacttccgcatagtaaaaaggtctgcccaaacgaccaacgcctcctagctttctttcctcctcaatcctggtttccttgctcagagctttaggcctggtttagttcccaatattttcttcaaacttttaactttttcatcacatcaaaatttttctacacacataaacttccaacttttccatcgcatcgttctaatttcaaccaaacttttaattttgacgtgaactaaacacaccctcagtaatgttcagacttaaaagagacaaaatgcttatgtcggtttggacttcggagacattttaattggagaatgaaccacttgttgactttaaaagtgaaaaaaaatatttagagaataaacaaaacacaatacactcatggatgattggatgcttaacatgtagtgttaataagaaattaatctaccacttgcggatctacgtacaacgtcgttgcctggaggaacgaagagcggctgcaatttaccgtgctgacagcactgtcaaacaaaacgaaattacgctacccaagtcatgtgaatgtgttctagcttgcgtgttaatttaaacgggtataattaaaaagcagcgcactgatacatacatgttgcccatacacaagcagatcagtcgagtgtgcaggaaattcccagtaaatttccatagcacttattttaataatatatagtcaaccaatcaatgaacactgtgaatgcactgcagttattgtgtgctactacaaaaactgttgccgacattgttcagcttgatggtgacgttccttttttttattttgtttgaaggtgaaaaggatctgtatacgtggtggtagagacatttactgataggaaaatgcatatattagcagtttagcgctaagtcctcttaattaatttgtgttacacatcactgacttgatgaagtgtgtgtgtctggctggaggtctcccgtacttcactaggagttcaaacagtgcagaaaattaaagagataataaaacaagaattctttgcagttgaattcacttgagacgtatatgtatcattcttttccaagggaaaggcgctgattattgaatatcgatgacagtttaagcaaacagttatcccaaacagaaaagttacagatatctgaacaaaagaaaaattggttgctgctaaacattcgtaaattcacctggattttctggactgtacgtgtgccggccagataatgtgaaacaggatcaaacagcttgaatttctcactcacaaatagaatatttagacgaaattcaatgaagacgtacgtcagtacattaggcttctctccaagtagtttcccccctccttcccgggaattattaacagtacaattaacacttaatcattatcagtacgatgtcatgtccatgttcctgaacatttccaacgacactctcgtccttccactctaagctttcgtccttctccaaaaccctacaaataccaccagatcgagctgccatgccatgcatctccacatgttcattcattcatccgccacattaatttctatcgtcacttcttgttttgagttatttctttcttccgatttcagttgtaagtcgctttaaccttctcaacttttttcttccaattttttgcactattcagataaatgaatgttaattctcattaagttacactatttcatactccctctatccctaaatataagggttttagttggatgtgtccagatttcttgtattaagatacgtcacatccaaccaaaaccccttatatctagagacggagtgagtattataagtcgttttgattttctttagtcaaatttattcaagtttgatcaaatttatgaaaaaaatagtaatatccgcaacacgaaattaaacgtttaatatattttgattatatgtttgttttatatcaaaaatatttgactaggaaaaagagtcgaaacgacttagagtatgagtatttttcttaatcctcctgcacaaatctaaaataatacatggttcatattttgaaaaagaataaaaaaaacagagagacagtagtccgtccatgaagcgacgagatcaggagcaagcgatcgcgaagctgacgagcagcggcggcggcggcggcggcggcgggagagacgacctcctgatcatcttcatgtggaccaagaaggccatgctcgccgccgtcgtggtggtcgtggccaagtgcagggagctctgggaaggggtgctcacggcgggctccggctgcggctgcgtgtcgcgttccgccgccgccgccgacgacgacgacggctactacttcggccggagctacgagttctcgtgctccgccaccccggtcgccttcgctccggcgaaagggcggcggcgccggcggcgctgcctgctgctgccaccctgcgtgggagccaagcaggcgagggagatgctgcgggaggcggcgatgatgtccccggcgccgcctgtcggtgccggcggcggtcgacgctcgccgccggagcggtcgccgcagtggtggagggagcaggagatcgacggcctcgcggaggagttcatcagccggttctacgagcagctgaggtcgcaggtggcggatgaggagcggcggcgggcgccggagtgcaagagcagggcgtcgtcgtcgccgccgtccccgtctccgccataggcgatggcttaattacgtgcgtgcaggttgtgtgcattaaatacgtacgctggtgtttgcgattaatgtcatgtggatgtgtgtgtgttttcgatgatgagagggagttcgttcgttagtgcagttttgaactttttgatatctttccttacggctttcacgcggtttggaattgcttgtctaattatctttgtcccgtgcagttttgcgcgaagctaaataatttacgtaaagttagattaaatatgtaataactctgaaattttaatttttttatgaactattatatggctcttaccttttatatatatatatatatatatatatatatatatatatatatatatatatatatatatatatatatatatatatatatatatatagctaaaccgcatccagggtgtgctataactaaaacgctcccctcacgtacggggcacccccacccacccaccccccaccccatgcagcccgcacaaacactcacccattagcccacacaaaaaattctttcgttaagtaaatcagttactatctgtagttttagttcgataagtaaacgagagttactatcaagttctccacaccatcaatcccgcagaactagaccgcacctttttttctttcctcttttttttctatttcctcccgcacttttttcgtgattatcccatcagtaacaagattactaagtttatcagtcactcagaaaatgagttactaacactccaacgctcccaaattgattccttccctcagtaaatggattactccgaggttatttttggcccttctcaatttggttccgaggttatttttggcccttctcaatttggttcctcctctcagtaaatgaatcactctcagagtctaatttggttcctcctctcagtaaatgaatcactcttagagtctcaggtcgttctcaactcttcacttagtaaataaattacttacgatagtagtattcctaattggttcatataccttctcttagtaaataaattacttagaattaacttattggtatcgccacgagatttctcttagtaaataaattactcttacaccgatggttctcaacataacatattgatcttgccacaaagtttctcatagtaaccaagttactattacactgatagttcaacaacatattgtctcttagtaactaaattactattaaatcgatgcttctcaacattccgtttgaaacatgcgcaaactttggcttgctgtgccaagtctccccagaatctgtgctttgcctcattatcgtcgtcaccaccgtgaagccatccttgccgtcactcctccctggacttgacatgcaccaacgcagttgacaggaggacaccactttctgcatctccggatgaggaaaaaattcagagagcctcctaatcatgttatgcttttgctcaagaataatgtgtagttataaaactgaaatatcaggtacgctcctaattcatcatgttgttgctaggaaattgaaatcacagagcatgaaaacacaaacagaaagattagtctgaatggcacatcaacagctagagggagcacataaaagaaaggagtataatttctcacagtaagtttgtttcccacttaaatatctgaacaaaaacagatccagaattacaggtagaatgaaacaaaattgaaaattgcatttgatttcctcaataattgcagatgctatgtattaaaaatgcacaaggatatgaacggaaacaaaatgattatggaactggaagcaaaacagccagcaactatatgttttcaacaggcctgactcaacaaatttgtgaaattattatgttcagctcagtcacacaataaaaataggaaaaggtgtttccagatgctaaaacatcactgcacaggtgctaaaacatcactgggttgaactttgggttaattgaagtgtatagcttaatttaacccagtgcaaattaaagcgcagcaaggaagatgcaactagccaaacaggaacaaattgatccacgatggatcaatgggacatgcatgtacattatacaaactcacgaaggaacacaagcaatcaacacatatctggcgccggcaaataagctgcaattagttgaccaaacacagcagctgtgcttcctccaaaaaaaggcagaagctatagcctatagagatcaatcgagcagacagatcatgtagcaaaataaaacaccaactaattgcacaatctaacactcgatcgagggcacgtatgtgtacgtgcagacgggtggattcagatcgattcaacgatagtatcaagattagattagagtgagtaaaaagccaagcgatcgaacaaacatgcaccattcaactgctctaccgagcgccatgaccgtcgcctctcctcctcgccgccgctgcaaactggatgtcagcacttcagtcccggaccgcaggccgccgtggaggattgggacaaggggctgcacggtggaagagacgacgaaggcgtagaactgctatggaggaggcggcggcgtggatactgctctcctccatgcattgtcgatctcgagatccataaaaaacggaaaattgaaaagagagaggatagtgggggtaaaaaaaatagataggcagacgtgcgggagggagggagggtggagggtgttgggggggggtgggggagggggtgtgggtgtgttttagctatactacacctttatatatatatatatatatatatatatatatatatatatatatatatatatatatatatatatatatatatatatatatatatatatatatatataggacactcatatggggcaccatggtgcccgggcaccatggtatctaatgcacaaaatcactcaaatttttcaaaattttcaaattgtgagtatatacctagttataataatttgattcatacctatacttatcaacaaaacaactcaaatttaactttatttcacaatccataattacatacctaactaattatatgtatggatgctatatacctagaatcaaaatctaacaaaaacaagttcaaattcagttcaaacttgctttaaactagttagtaaagtagttaatgttaatacctaagtaattgaaaaagtttcatactcatttgaattgggtatatactcaatttcaacaatggtgcccgggcaccatggagcaccaaacaaatttactatatatatatatatatatataattgtattttgtaatacaattataccaatcaatctatacagtattataatccggactcaccaatatctaactgtaaaaatctttttctttttctccgattaacgtgagaatttctaacctgatactccttttaagactatattaataatataatataataataggtgggatgcggattactccttcgcttgcccaaatatttatgggctttgtttgttctaggacacacatcttgatgttgtgtaaccaaagtaaatctagctaccaaaactgctaactatcgggatcctaactcactagtggagatgggcacatctacgacaacacacaattgtcatgcaagatgcaaaattcgtcataaaataacttctatgatgaacttatgataaaatagagttcgacgtagaactcgagggatcagatccccttcctagtatacccaagacatgagattgtgcgagctcgtcttgcgaaggaggacggtgggcaccaagagcaacagacagtcttcgaagtgaagggtgatgggcatgatagcaaaaaaaacaccttgccatccgcctccccttctgcagcaaccgcaccctcggccttagcttctaccatcgtagcatccgagtcgctcccagaagagttggagcaaaaccacgccctcctccctaccgtcaaggctcagccgattcttagtgccccaaaaattctgagcagcagtgaccttacctcctccaccgtcaccacgaccggcacggcggcgaacagcgaggggaagacggcaatggtggccgccacggtgtgcagcatgaaaggctcgctggagaaaggccccactaatccccgcgtcactagggagcatgttgtcgggagtagaggcttgtgtcgccttactgtgtcacaagagggggtgggggagggggtgttggaaggaagggggtcttgccagataacggttccgtgccactgaggaacactttaccgtagttagagacatggaacagattggagatcaagggagagagaaagggcctcaacctagtacaaatgggtgtcaactagtactagatgtgatgcccataggtatcaattggtaccagatcagccggtaccaatgaggtatcagaattcgatacatatttgctatcatagcgtccaaacgggatctcgcgatatagcaatgggatgcaaaaaaaaatattgcctccaaagaaataaccggcccatagaaccactacagcaacctttgcccgtagaaaatttaaccctaaaattattaacccatcttttcttataccctattataacgaaaattgaacccctaaaattattaaaccatcttttcttataccctattataacgcactggtacatcgaattatcgctattacataaaaaaaaagcatgtacaaatgatctgccatacaatagactgaaaattggtggaaacttacaggttatctgagcaaccagatgaccattgaattacgagaaccacgacgctttgacgcgcacacacctgttactactctctacttccagttactggtgacgcagtagtcaagaaactccagaccatgaccttgttttccagaaacaagtcaaaaaatgcgactctgcaactgctgattacttgcgccaagagatatcttgtgcagtttaaagcgtacttactagatacaacactgaaatttactttttcacgccgatgctcaattatttgcatcattaaataagcattctttcatatattttcttttctgaaagaggatctagtagctataggattaaatgagttagagcaaggataataataggctataagcaagctatatgcttatgtggaagagagagaaaaaaagtgggtagtgttggctcttatgcaagagccagcttcacacaagccacaagaaatatgcattaaattcatagggtgagaaagaaagagaatggaaaaaataaagttaacctatagctaatttattatacaagttagctctaacattcacttatagtaagcagtgagctcaagtattaaacttgctcttatggactaggaaaaaaaaagagaaaaggttcactaattttggcttatgctactgtacctgtaataagtacagtaaattatatcgcgtgtggtcgcaggatggcagctcaggtgacaatttcaacaaagcctcaattgaacgcgatgacaaacgacttgtatttaagccatcattgaaagcgaacgtgggataagtattttttttaaaaaaaacaacaacatactggcgcaaaaatttacagcttacagaaaaccatactggcacaaaacttacaacctacaaatacctaaacattctgtaagaatgcatttgcatcctgggatatggtgatgccttcctggctgcatcagcattgaccacactttacaaatccagaatatatacattccccacaaaatggagagcaacacctaagatcctatattcctatgagcactgcaagacggctaccgtggccgagatccagggatggcagagaagcttccgctgtcagacatgtaatagtggttgtaattgattctcgtaacgagatccgccagatgggggaagtgaccaacattgagcttgaaagataggatctgaaaaaggatattgagattgtcatgaatctactgaaaataccaagttcagacaacataggagatcattgagttttgctggtagtagatggaagcatacccgcaggagaaatacaacgcactcgtcaaattgcttctcgatgcgatccacttccatctcgcatcttgccttgacggctggagcagttccaccagtaccaagagtctgttctatgttgtggaagtcaagtgccaatccaagaatggtcttaactcgactggctatgagggcccactgcacacaggcaatgttcattgccgcaatgaacactcttagctagaataaagtttttggaattaagctttgatgattgtaataagaacgacaagttactcaccaacttatcagaggccacaaagcattgtcgctgaatagaagagaggtatgcttcatgaacttccatgacttcatccagtgtagtggcggatgccatgccatcacaaagctcagtccacgcactatggtatacctactcaaaactgtgtcatgagtacagtagagagatgtacaaaggaatggatcgaaaatacccaactcacccgatccatgacatattgatgaaatgcatcaacaaaatgaaggagcttctgctcaactattaaatgttgcttaaaattatgcatagtgctgcctccgccctgccaatggggaaaggtttgatacatcagaatgaaactatcatattgagaagtcagagcaaatccaagtacccaactatcaaacactatgagtttatactgtttccagatttatcagacgacaacatgcaaaataaataaataaatagattccataagatggtggcagggttataggatggataagtaccttccacatccactttcgagtttcgtccaaaataaactttgcacgcttgacctttagtaagaatgccatgacctgatcgagcaaaacagcaaaaggccaaaagccatcaaatacatggcactgttaaataattagtctagaaagtaagtacctggttatacttcttcagtgcctccgtattgacaatcagatcaagaggccaagacacctgccacccaacagcataacatgaacacatggtaaagaacgcagaatattggtgctgttttgtgcataccttatatgtaaaattaagcacatcaagtgcctcgatgccaaaaccttgtgcgcgacctttcctagaaattgatgtagtttcttcatcgttgcgcgtatcatgctttgctaacgagacgaccaaagaatctggcgcagtcagcagcattttgtcagctgagtttcttatggattcctgcagccaagaattgatagagctattaagatccttatgtggcatcaattttgtcgcactagattagcatagtgaatcacctgtagcaaagtattcaactcaaaatcatcatcccagggatttcctttgtcgagcttgtcaaaaattgttaccagaaactgctgcagcatgtcacctgaaggctcaagttggtcaatagaattgtatttatttctttatttggtttgaaaataatgtttttctttgatgaaacatgtatttaacctagacatagtaaaaagatttttttcagggaaaatattacgagaggttaagaacagctcaatgataggttgatagcataatacctgaccctagcaaataaatagcacgtaaaacaaagagttcgtccattaatctccagtcacccattagctttgacaagatttgcttgccaatgtgatcaacctgttgagggggaaaatgcaaaaacctgttatacggatgactaacaagatatataacgtaaataactaaatgctagtataatgtttgagcagacctgtctctttatacatttagaaaggcattcttggatgataccaactggttgaagaggatctctcaaactcatgctctgaataaacttcaaagctcttgaggcaagtgtgctatctttctgcaaaggtaagatctctgacagcgggacattttcctgaagggagaaagggttaacaactaataagaaaacatgaacaagaaactatacttcagaatcagtctcacatttacacatggcagaagagtcgggaatgtatagagagcctccaaggttctcctgtcatcctcttggcggatatattctgaatcatcaaactgaaaaccaaacttgtaatcagttccgtctagtctggggaaatatgttgtagatagggtatcaccagggatggtccctgaagagtctctatcaccaaatatagacttccgtatgttctcatcattcagtggaggaagatggaaacttttagagatatttaagtcgctccaggagtttttgttcctctctagcatttcttgacaagcagtgatgcctgggttttcatagcaagataggttgaaatagctttctacttcagtggaagatacatcttgatgatctccagggacaaatgttggatccctcataacagcattttttgctaaagttttctccatgccatcatagtcccttcctgatgtagcatctcttaggagctttaaccaagtcttctcagagctgttttctccacatacctcttctgtttcttgtacattactcttactgtgcacaattgttttgttaactggagcattatcagcacacaactttcttaagtaatcatcaacatggtcaccattttccaacagaccagataggcatatcaagaaactctcagacaaagttaagaaatccattttgcaagcattatttccaaactggcctgtagattcttcaataatatcttcacgcttatcttgaattcttatacttgaggtatcaggccgaaacttctgttgactaatgtaattgccatgctgatcaatattaaactcatgtatgacttcacgagtttgaatccgatgtgtctcttgaacatgctgaacaagctgaaatgatttcccagcagataaaatggctcttgcaatatctttcaagaacactgggcataatatatccgcgcaaccttgattgctagatttcaagagagctgctgcagcagttgtttcctggttgattaattcctttttcctgatagattcattgtcagctaatgttgatgagctatcggttcgtggtcctcgtactctcagcatataactcatttcccagaatgccggttgatctattgtaactgctttgttcgcgtaaaagaacatctacagaaaacaggttcccaaaccacaacagggaagttttaaaaatgcaaatttaagtaacacatttcatgatagttgctcaataaaattaaaattaaaggacttaggcatccctaacaggattacattaggcatcaaggtgatgtttaactacatgatcacacgcaactcttcagcaggcattaataaaacggaagggtttataagactcaccaaacttaaaaaatgagcccaacacaaagaaacatttcacactcaagagtaataaccttatactagaaaggattatagtatgctcatagaagatatacaggtcaggatcataattgcatatacttataggtgactttcaggagacaaatcgaataggattaagatctctgccaaatgccaatccaacaaataaaaaaatatttgtgtttataacataatgatatcatcatgatttatgtttgcaccaatgtagctcaggtcgagcaaaggatacaggccatccttacagtatttcacaactaacgtgtagagaaatctttaaatttaagaatatcagttaataatttcaaatgtagctcaaaaaatgtcttccttcaatacctcttcattagggtcatcaagaataccatcatagagccaggaatcaagacactgaagatatggtaacaaggttccagcgaatatcacaagcagcatatgataaggttcaccctggaatttatagagatttcaaatgtaagagagttgagcattctgttaataaacaaataagaccaagtatttggacaactggtttttttgtggcaacctcgccatcttccacaagacagacttcatttaacttcttaaaaagatggtttacagcatgaaccgccacttcactagatgccatctgtgcgccagaattccaaaaggcatcaggcacagctccttgcacaacttgatacaaatgttctgctccagaacataaactgcataagattttatattatggggtgagtgaaaaccacagtctgtcaagtgataaagaagcatgaaactgaaaacacaggttgtcagttgtacagtcctctccggcttttagaaaactacctaaaatggtaaaaaggaaaaaaaaagactatactatcatgtctctataatctcatatctctatgcaactttttttgccatcacacattacatagagttgctgatatctctagaatcacctatagtaacatacaacatcactactaaaagctaacctagttatccatttcgtacaacagtaagaggtccttgactaaagtaatggtcactctgatgaagaaaagtaatgttatagtagaatagaccatgaccttgacatagaatcagtcaatcccagcagagttatagtcctttcaactgaaagaaacaactgctcttcctccttcagagctgctttgcggagcctctgatattaacataacaacaatgtaatttcggacaaaacaaacatcatccccgaaaaatctatgcagtctgaattgcaacctcaccattagccaagaatcgaccgaactagcaaatgcactcagcgtcggagttccatgaccgcacgatcttaccctcccaacaaagagctccacctgcttcaagcatgttgcagcaaacagaaaaggcttgagcacagctctgaggctcgtctgtgacaggtgcgaaacatagatccctgctttctcacagtatcccggcgcagtcttgtcccagtagagcaagaccgtgtcaaagccttggagcacttcgaagacacttttaacctgtaacatgtgcaacaccaatatagtgcatatctacacgatcatacacataaaagaagcatagcagcaattcccactaataatggaaggaacagaagtgaagcagtcagaatgaattacccaccaattcatgctcttgtgtactcagttctggaacaggcgccgcatgaggaaggccatcagaaacgctgagctgcagcttgcgtatgaagctcgcagagccatcggcctccatcaatcctgcgtttagctggggaagaaccatgggtggatcccctctgacatttgcatgaatgaaaaggagttaattgcgcattgagccaggtatttttactatagcttcattcacattggactaggtattagccatccatttcaattgacaccataaatttgcataactttgcaggttgaattaaaaaaaaaaaagcagattgtaccagggtgggcaacattgcacccaagtccccaaaatggccacccaaaatcacaaaacatcagtggcggatccaacttgggacatgggggttcagttgaacccccaaacttttgcgggaacaaacaaactgttactacttgtattaaggttaaggctcgcttcttccagatctagaactagaagagaaggctagggttaacgagcgcaagcaaattccagaccaaaagtactcctccgggtgggagctgagagatgaaccagaaagaggatgtggatgctcaccaggatcccctccccctccccctcccctgctctgctcgccagatggacgactcgtctcggcgcgagggaagcggaggagacgacgagacgggagatctctctctctcttacgccaaggagaaggaaggggaagatactcgagtacttcaccttttactagtatatctcatttcctgctttgctttgctcgcgatatggagatcggcgacccgcgcgggcagcgggcggcgggagggcgggagaaagaactcgcgaggagccgacgccgtcatcacgccgacgagaggggggattgaggggggcctagtccctgacatgtggaccccacatatcggcgaccaccacgtcacggggcatcacgggcttccgcaccaaaggggatgggggaaaagtataagccaaaatttataatttttaaactttaaaacttgattttcgaggcagttttgcggtttatcatcgtagtttatgttatagcatttacttttggatcgctaaggacataagtatgaaattttactcataaattatactattaattactaataaggcaacagaaatacattcaaggcacactaattttcgtataattttaattgctaatatgccaatgcatacttattttttccttttttttcttccttcgacacgctatgactatgttgggatgcctgaaatataaggatttctatattgtcctctctcctagatatatcattttaatttcttactcatatatcaaattaaactaacatttttttttcggaatcaaatagataatcaaccatttttttccctcgttctcatatacaatgagcactgaaaacttgcatttttaagattttaaaattatattataaatatataaattcagaatgtgaaatggaatttatagtatgagatttgattttttttaattaaaaaaatgtgacaccataaacatatctagtaaagataaatatttgttacccatgtaagaggactaccataactaaaaataatataattaaatcgtttatctattctattcaaaccgagatgtttgttctctctgttctaaaatataaggatttttatgttgtttagcaagtattaagggtttaggcaatttttgaattttgaatagcttagattatttttttcaagcatttgattggtagtggaatcattgaaatgatataattcgtggaaatcaacacaaaattgcttatattgatgtacagaatttgaatcctagatattcttatattttggaatggatggagcatattttttatgaatatattggacgcactgtttaactaaaaattgcatttctctttctcatacatgtgtgcactatgatcagtggattgtccatttctgttgcgttacgcagctgttttatccatgttggtgtgggtctgaccactacacagcggtgaatggggtcggtcctccggcggtaggatttctttgtcgtgcaggtggatttggggtagcaaaagtgcaaaaccccacggaccagctgccatctttacacatgaccgaaacagtacatggataggttaactggaggacaccgccggttttcgcgaggagctttgtccactagaaaatccacgttccaaggaacaaaaataaacggaacgccatgggagcatgtgggtataatatgagaccccatgaatgcagtgcagtcagaagactcggaacaagcataacgaggtgaaaccatcgaatccagagaagacggcagtggcaatcttgggatacctctttaagttcaatcctgaattttaattgactgcgctctcggtattatgttgtgtctacaaagaactgcagtgcaccaagtacacgacattattaagtttaggggaaaaacaatgtatcttaacctcaacattacggtgtaaaacggaataatagttcagcatcaagcaacagtgctcaaactaaggaagtttcgcctcgctaagttctgttctaactgcataaataaggtaatcctcattttctttctctatgtttttcatctaaagctcccggtagagtctgacccggtgtccaaaacttgatgatagcttaccgacgccattgctgtcttgagcagccttctctcatctaccgacgccctccagttctcctagccgctggagcttgctcttcctcgtcagattcaacatcaccatactgccagatctgcagcctttccttctttgctttctcctggaactgttccagattctggagagcagcctttctctccctagtatcccatctcttgcttctttcaagccgagcaagcccttcctgcataaacagaatgggaatattagcaacgaagacaatttcacatatctctgtgactagtttgcaagcagccttcaatctcaaacagaagcaatgttgagtagcattcatatgtgacagcagactatgcagaagctaaccgacaactaatttaagatcaccacaattcataatgttaagtagcaagtagcacgaacctcaagcatggtagcattgatgctggtttctgtctctgcgtcaaccagtgtaacaatcagaatagttccagtgccttgtcccttggactttccaccagaagtatcacgctcttcaatcattgccctgtattgtttttggctgttgagcaagcaatcattcagatagactgctgcttcatggccaaaatcatcttctaggttgggcacttttatgaaggcaaggctgcacaactgagcaagagcaggcgaagaggaaattgatgggtcagcaggccgtatgcgactgtaaggaacgacttcttggttgccatagtcaatgtagaatacttcaaacttgtcgtcttgagatgatacagctcctcgaggtccattcacaatctgcagatcagttaaaatggatatacttcctaattatttttgaaaaccagaaactagaaacgggaatgttcaacttaacaagtccaggactaaaatggttcataagaataaaacatgagtttgtgcaatttcctagagatgatcccatggatgatggatcatgtaattaaaacaacaggatgaaatcactagctgtttaggcaatcaacagcagaacattagcgaagctatgaggtaaaaacaacattggcataaaacactaatgccccaagtcccttaaatattcaactaaagaatatatcatctaagtcccttttatccaatccttcattttagcaggaacacaagtttgagcaagtcaaatgaattacaatggattctaacaatatcacccatttcctgggtccaaattaactcaagtggcccaaacatttatgaaaataagcaattactcaattggtatgacccaccacttgtagaaatttttacttgactatacagaacagctaaccaagggaacaattgatttgcaaagatagcatattatcattctaaagtcacaacacaattaatgccattaaaccccctttgcaaggaaaaatgtaaataccaaaagaaattttgtgaagttctagtaagctgcttaggttagcataaacctaaaccatgaccccaacacataattagttttgacttgcaacatagaagtgagacatacaggcaactttcaagatcaggatagaagtgaaacgtaccattgctctattccaggagttgtcagcactaaactgagcaagaactatttcccccttcacaggattaaaagcaccaataacaggtgcatctttaagttttaaagatgcaagctgttgttgaatggaagccactctatggtcaccaactgtttggacatagaactttccaccaccaaggacttcagttacaacaacctgaatatggaaaccaggttaacagtttgtttacaaaatggcaagtctgtacattccaatatattcttgatcaacaaaccttgagaatttccttttgtttggattcagatgcagatccattggaaacttcttcaccctctacataattctcccagatcttgaaaaagaaaaggatgtcagcatgttttctccttgtgtagttcaagaatagaagtggttaccttgagtttctgctgctttgcagactgttcagccctcattagaacatttgcatccggaatcctatccaagccaaatgaactaagcttggccagaccagcctccagaagaacagaagccatgttggttttggactcccataaggaacctaagaatgtcccagttctatcaactgcttcaacctctatctgtagaatcacatggtattatttagacatcgaagccatggaggtggattaaccaaagatgcacaagagtcatacctccacatctcgctgtagaattctcctcctcatcaaagcaatagcttcgttcgagtagggctcatctttaccagggcatctaacaccagagaaagagaaggcaatgctgcaagtctccttaggaattgttagtttgaaacggtggccactgaagacatattcaacaattgcggaatgtcttctgttccgctgtaagaaaggaaggaagtctctggccttctttgctgaaacctgagcgcataggaactacgagttaataaaggtgccaaaggaaaagtaaaagtaaaagaacaagcaagagtgccaaaccgttgtcaagtctgttatgtgcatgacaggtgattcttttgcagaatgaactcctttctttgctttctcagctcgtgattcagccgccaacagcaggtcaaaatagtgtgacctttcttcgtagtcccgatgtttagatgttctagcaaagccccttgagagcagagtctcagcaatattgataccaggttggttgcctgagcttggaatggaagaaacatcatcaccatcagcctgcgaaggtgaaccaagaaaaaccgacccataatccaaaaccctggcatcagctgtgtttgttgtgggctgtccatccacagtgctgatccttctagagtattccatctcaacagtcacctggaaataggaaggagaaaaaatcaataaattttcaacaaaggtaacaacttgttatggaacttctgatggaatatctcaaaacctatgtacatacttgcttgccaatcaaccttgtgcgcaagaattccttggcttcacgagcaaaattatcaggcttctcatctctacgagggttgcccattttaggagctctaatgcttgaaagattaacccggcgttctgcagaaggacttccgtaaggagctgcgtcatcagcaacaatgatgcaatccccactcacaacctctacaacctatgaaaggatcaacacaaagcaaattagcttcaatcgcatgatcatgttgaatacactacttgtgagaacagggaacccacttttccagtgaatttctggtcgtggattggcttcgagtttgtcactggtggcttaaatcctgtccaaattctcaactggtccttcttagcctgaagctcagcattcttcagctttatttttgcatcaacgtccatcatgttggcactccactcaacatacttggcaagaccctgcataattaatcatacaaaagaatttcaatgcaagcagatctcattattaaaataaatcttaaaaagaatcatgtgagtcaaatgaaaggtagtggataaataattgatcgtacattttcaacaagctcaagggccagatccttcaatgtatccccatcagagtaatacactgagccaattatattgctgaaactatctgtgccttccaccacaattcgcacctagaggaaagttcaaaagagaacagaaggaacttatgaaatatagtaattattgtttgcaaagaggattaaaaactttgaatcatgatatgtcttacatctctattgagaacccgtgtctctgtgaagtgcttagcttctattccaaacctgtccggtggaatttcagtagaaaccgctgctgcggcaagcctttgggctgtagtcagtggtgctggagcttcctcagaatctccaccgtttgtagcgccatcagcagtactctctgctgcagccaccactgtaggattcggtgggcgcctccccatggatggagactacatttttgtctaatcaacattcacctttctaaacatgaaaaaagaaacaatagtagacaaaagggtccatgacaagcatacctgaactccagcaacatatatctgaacaaattggaaacttgggagcaagtaaacacgaactgtactgccatcacgaacttgttcaacaatggcttccagactcttgcctttattcgcaactgcaaaaccctttgcatcaaaaccactagcttcaccaattgctgatggtggaagatctcttattgattcttcagcagcaccaggttcctgaaagtttaaaaagaacatgcataaaaaagcaaacaataaagcattcatctcttgcagtacaaagaaaaagggggagggggcagaaacaaaaagatttgctaaccttgctccaacgacctaaaccctgctgcttagcaacttcctccaaccttagcagctcagtaagatatggactcggttcaccgccctttgggccttgctcctttacccttgcccatcctgcagcaattatcgagtaggcaacattcttgtcaccgaggtaaacagtaccaaattctcgtccaacatttggagctgtgtagtccactctgaatgtgacctcctgtaacatgtttgaatttttcattggtaacagggaaactggcatgttttctacaaacacaatcgatatctatgcatttaagtaaattcaaagaagatctaaaattcacatggagtacctttcctatgcagagtttccttagaaactccctgctttcccaagcaaatggttcatccactccaccacggcgagccttgagcagcacaaagttttagtttcaatacataaagcaaaaagggagggaaagactggagaataagaataaattcataagttttgaactacacgagaaaatataaaaccatagcgtaggaatattaatgcatgcggtggtggaaagagtccgattgtcactattatactgcctctggttttatttgtttgacattggtcatataaaaaaggaaggatggagtatttccattagttttaggggttacacaaaagtcgtccactttggaacagaccaaacacttccacaaattcatgagacaaatgaacctagaaaatgtgttatattgtctgactacatcaagtccatataaatcttaccagccttggggccatgaggtatgacagagtaatcgacttctcaggcggcgggacatccgccttggtgctccccatgatgagaagacagtccccagaagtcacacccttcaccttacccctcagccatccagacgctccagtggctgacgccatgatagtaagctacaccctgcgatcaaacgaaaggatagaaccagcttagccaaagccaaatttagtatgcctgggctaacctatcgtaccaacccacaaattttctcctatctgaaaatgaattacgatagataccccccaccctaaacaagaagcagctaactatcatcaatcagatattcattcaggaggaacgtaagtggtcagcacgtatcacgctcttatcctacactggtatggctagaaacgagcatgtttctctaaaaggaaacttggggaaaattgcccccgaaagatttggcccacaccccaccccaaataactgcaagattccaaccactccaggggtcaaaagctcaaaccccggccacctttctgcagcgatggcccccagtgcacggcagagtaaaccacccgcaatgcgcaagcacgtacagatgcaaatctcacggatacgccacgaagaagaagaaaaaaaaagctgcaacggtagcagcacgcgcagatctgacgcctagcccatccagaaacccacgcgatctcgtgaaattcccggcgtccggaaccagaccccccgagcaaaacggcggagcagagtagagccgccgccgccgccgcccgcccgaatcgacacccgcgacccacagatcgggcggcggcgggaccccagaccgccagatctgagccccggcacacccaacaacgcacgagatggagacggaggcatcggatcaggggggagcggctcacctcacctcagctcagctcggcgcgatcgcctcgagagagagggcggggagcggggtgtagacggctagatccgtccggcggcgacggcggcggcggtgccctctccacgagcccacgatcccgtcgccgacgacgcagcggcgcggcgaggcgaggggagagagcgcgtgagaggtttttggggtgtagcgatgcgcggaacggaggagatgggtagggaggaggcttggttttatattgggcactcctccctcccacacactgcgttaattacccgtttcgaccaatttatttaccgtggttaattacttcagaggaaaaaaaaaaggtgggtttagatagatcagggtgacgtggcttggataagggcccacgtagcagtgagaggtcgcgcgtgctgtccgcttgcgtcacgcgaacgggtgtggtggatttgttagggaacaggacggggctgacggttaggcagagtcgggtaagagtgatggcaaaaccaatccactcctgatacgagctggatgtaataaacatcatatatttatttttttctattttactatcaccggttaaatactttggcttattttctttctaaattggttagcaacatctaacaatgtttgggtggagtatttatatttatttatttattattgactttttaaattagttgtcgtgttgatcatagaattaagaatttgcatattaattgaaacttttaataaatttgattacaaaagaaaaggaactaattatacgtttccgtgctgagacttttggactctatccttctccatagaaatatgaaatccatatgtttttataagccgggggtgcctattgtgcgcctctagttttattagattatttatatcatggtgcaacgataattacgtaacaagacaaagcagaagacacaacagaatagaaaagcacaatttgcacacaatatatcgcttgtttctttatgaggtatttccttagaactagtgcatatgaataaacttgcaatgcaaccctgcagaagcagcaaagaaacaatttatcaaagtgaatctcaccgtagtataaaatgatggcatataaatctcctttaaaaaactaattgcaggtaacgcactataaactgtaaattgatatagtacttcttttgatcaaatccatccgcggcctgatcactagtacatcagtgcatggctttggatgttagctgttaaaaaaaacattgtagggaaataagcaagcacacggtaaatatggtttgtggtctcaactgacaatatatatcaggagttcaatagtggttctatagtatggcaagcaaccaatatgatcaaagaaaccgattcattaatgccccaattttagttcgaaagcctgatgaaaccaatctttatacgagtatatgctagtccgagaacattagccaatcattaattacattctgactcaatattaattctacaatacatattttaggatgccctatgtcaccaagaatcaaacctggcattgaatatgataaacactactccctccgtttcacaatgtaagtcattctagcatttcccacattaatattgatgctaatgaatctagacatatatatctatttaggttcattagcatcaatataaatgcgaaaaatactagaatgacttacattgtgaaacggaggaagtatgtgattccacacactttgctacgggatttattaagtatttttaatatatttttttgacaatcgacctaggagtaaaaggaaaaaaaataatgaaacatgagggtttatcagtacctatcgtaaaacaaacaaattatatccgcgctttgatgtagaatatattgataagtatatgttaaatattataaaaatgataaatagatttgttaaaatattgtggaaatgatgtgagggatgattattagatatacttgcatgttgatttgtagaattagataaataaattatagatgatgttgcatacttgcatgagattaaatatgtaattattgctagtgggtgattttcatggttacggattggtaatttaacacgagatgtcatcagccacaagaaaatttaacatctttttgctaagcaaaaataatacattatagtgatatgggtattaaaaactaacctaacttaatatgaaaatccagaatagctgtgatgaaaggataaattatgttgatataagtatacgaaagtacctgacatacagtgttcacctagatgctaaacactagatggacagtgacccatggtctagaggctagccagtttaaacgatataccatacaatatactatcggcatattttttttcttggcacacatgtatatatgcttaacatgttccatagaatattggagaaccaacgatgctatgataggtgaagccactcgcgtaaaaccatgggtcggagagaggtggaagcaagctccagggtggtgactaatagaatagaggcaacgtgaccttgtcgtagtgactggcttagagtataagagaagggtttggaatgcagtcaaaaacctaaaccatatgggctttgggttgggcttaaagtttcaactcccgtcatataaaaaatgcattggcccattgcctagaccatagtctaaacgacaagtttatgatttacactcttctgaatgttgtctaactgtgtagtctagacggtctaggatcgtctttggccgactagatggtcaaaaagtccaattcacagtttaagccctaaacaagatgataacccatcttctagcatctatatgcggtctatatcatctagattatggtctacgtgaacactgctaacatatgctaggatcaactaggtgtggcaaaatacctgttggggacggggatccgatatgtacctgtccttatggggttggggacggggccagatttcgacccgtgggtctaccagggcaggggcaaggattgattctcacttgtaggtgacccatgaggccttgaaaaatataaagcccataaaattcaatgtcaaaattcacaagtcactctaataccctagaaggtcatgatggtactaacacttatagattatatagtcaaagagtaactaacacatcaaagctaatttcagtcaggaaatcgcgtagtcatgacgtacttcatgggtatttattaaattgcatgtctcgcacctgttccacgtaggatatggatatttatttgtcttatataagcaaaagcaagcatatctttttgaaaggtaattaaaggggcttttattgttttcattgttcaattaattttcacgtatgagcaacttttgtttcattaggcttgcttcttgctattattgctttcctatgtcaacagataagggtggaattatatttcatctggtcattctattacttgaggggttcaatatgttcacgttgttatgatgaaaatttgtgtgcatgcttaaaattaaagtgtttttgccacatgctcatccacatgtgcacaaaccacctaacttagcctaaaaatgatgcataacaagcggcccattacacaataacccagtaccatctagctgccatttcacacttttattttggatctgcatccaacaggacaaacactgaacaattgaatgaactaattaatggggctgtaagggaaatagcaacctttcctctatgtgattgaactctcattcgtttttgatagccatagggatggtagaccttgttctttcaactgcttgggttcttgctagaaaaataaaagttgttatattttgtttagttgaagcatatatatggatgtgtcttatacctacatatatgcggcggagctactatatatttaccggggtctaatgaccccgataaaagtttctaacaccatgttaattattattcatcacccttaagcagagaagagtaaccctatagtgtaatgtgagtgaccctagtgatattttcctctagctccgccctacacatgtacatcctttgaatctcttcttcctcccttgttagattcacatatagttatatgactgattccaataggtcagttaactcaatttattatggttaggacctccattgaaaattctgaaaggaaaaggtttgtgacatatatggcatactttcaatgattattattcaacttaccatgcaattttctcactactctctcaactctacagcgtgaactatggtagggattaatgggaataagtgttattcacttgaaatgggtgggataaatctcctcatgcctaattcactttgagttttttttaatttagaagattattgaagtgaaacaaacgtgagtggcatgtttacgtgtgtgtgtgtgatatttgaaatccatagacctaagatttcaattttctacttgaaaaaaaaggaaaattatgtggccctacatacaaaattgaagaagtcaaagtatcggagactcaagtggtcaatccaacgtactcaccataataattatcttcatctgatccatcacagttctatcctagaggaagttatttttggtactaccatatgcatgtgcacgcacatgcctaacaacattttcttgctttgattctatgcttcaattcctttctacaaaacgctctacgaggaaggagatcagaaaataaggctataacaacaaaacttcgttggaccaacttggtctcaacaaaataatgtgtttttacattgcataactagtatgattcaaaccaatgtaatgatagaattttagttagcctcatttatttgaactagtttttttttatcggtgagtgttgattctctcagtatttagctaaaaaaaaattccgcccttgatttattggaaaagccatgtatttttacaatgttgaaatagtccttaaagcacatgcaccacttgaaaaatattagacacaacagcgattgcgctctctctctctctctctcatttggtcagggcaccttgatggatgctgcaagttactacgtagccagttgtaatatgaacctagatagtggatgtgtgctaggaatcatagcactaaattatatgccaggcgatatattttgactaattacagtgctaaatttttttataactaattttgatgcaagctaagtcagagaaaatagtgaggtatataaaatatgagagagccatggctcatgacccttactagtcccttatccctacgcctatgctgcaagggtggtaggataatatcttcacgctcaatttgtgaccattttaattatgccacaccgatcaggtttattaacattcactaaatttgttgcatatatttgtcctccattgatcagcatgcgctaatttatgttgcatgttgcattattgaacattttaattccattcgcattatacaaacctgcacattgtaagaccataaacagtgtaagggttccaacacgtcatgtaggatgaggttgctttgaggatactagctaatacaattctgaccacctctaatctaccgacgtaccccacctgtaagtgccctacctagttttttttcacctttacccctccctctcaccgtggccccaaatcactcaccacttccaatccccctctgtagcggcagtcgctccctctcctcggaagcatcggcgacaaagtttctcccatctcacctaggcccgtcgatgagggcgtgcaaacggagcgcccgtacagggccccacaaaaaaaattgaggccccccaaatcagagaggccatagcacaaccagccagtcgtagctatagcattgacgttctgtgtgtgttcatgtgcatgcgatataatgagaggcagcgagtcgtgtactccggcctatcactggtggagaaaccatctttcgtcggtcggccgaattccacaatagtcccggatgcaataaaaaccggggctaaagatgatctttagtcccggttaaaaagggtaacgggcatatttgatctttagtcccggttggtaagatcatctttagtcccggttcaaatgctgtcagggcctgtcaggacccccaccaaccgggactaaagatcgtaacttaccaaccgggactaaagtcccacccctatatatatgtcttcttcctcctccagctgcccgagcaagcttcaaaatttcttcaaaaaagaggggaggtcatgccaaaatttctagtgaatttattttggtgattacatacaaatcggaggtgcctaaaaggtttgcatcttcatcctccaatgtttttttttgtcatattacatttgcagctatgtttggcatacttttttgtctccaaaatttagttgtaagttgatgagggagaaaatttgtgtggggaagaaagaatatatagaaatttagttgatttgctaaagaaggttttataaaatagttgagaaggaaaactatagtgagagttaatcttgaatactagaaaacaaactaaaatgaaaattaaaagaagtaaaacacattaaaattagtttaaaactttagaaatagtaaataagaattatttggtgtaatattttatgatttttgtatgaataaagatatgtcattattatatgactgttgaaacagtttgtaattatcttataattattgtatgactgtcattattgtaagaataattatttttgtacgattttttctcgactcatgtagatggatcggcaatggatgtacgctgaccggtggtccaaagagtttattgacggcgtgcactattttttgagagtggccgaagctaacaggcaaaggggttttatttgttgtccatgcaataagtgtaagaatcagaaggagtattctgcatcaaggactattcatttccacttgtttgagtcggggttcatgccaagctataatttttggacatcccacggagagcaaggtgttgaaatggaagaagatgaagtggaagacgacaatattccggactttgctcagtacgttggatttgaaggaaatcaaacgggcgaggaggaaagggatgctgatggtaacgacgttgcggatgatcttggtcagatgttgcaggacaccaaggaggactgcgaaagtgaaaagggagcccataaattggacaagatgttagaggaccacagaacttcgttgtacccaggttgcgagcaggggcacaaaaagttggatgccactctggagttcttgcaatggaaggcaaaaaatggggttagtgacaaggcatttggcgatttattgaaactcgtcaagaacattcttccggagggaaataaattgcccgagacaacatacgaggctaagaagatagtctgcccgctaggactggaagttcagaagattcacgcatgtccaaatgattgtatcctatatcgcggtgaggagtatgagaacctagaagcatgccctgtttgcaaggcactacgatacaagattagacgagacgatccaggagaagttgacgggcagctaacaaagaagagaattcctgctaaggtgatgtggtatttccctataataccacggataaggcgtttgttcaggaacaaggggaatgctaggatgatgcgatggcacgctgaagagcgtcaacaggacgtgatgctgagacaccccgccgatggttcgcagtggcgaaacatagacagaaaatttaaagaatttggaaaggacgcacgaaacatacggtttggtttgagtacggatggcatgaatccttttggagagatgagcagcggccatagcacttggcccgttacgatgtgtatctacaacctcccccctggctatgcatgaagaggaagtacataatgatgccaattattattcaaggccccaagcaacctgataacgacatcgatgtgtacctaagaccactggtcgaagatcttaagctgttgtggaagaaggaaggtgtccccgtgtgggacaaggacaaacaggaggagtttaacatacgagcgctgctgttcgtaaccattaacgattggcctgcacttagcaacctatctggacagtccaacaaggggtacaaggcttgcactcactgtatggatgaaacagaaagtacgtatcttaagcactgtaggaaggttgtatacatgggtcatcgtcgattccttgcagcaaaccacccggtacggaagaaagtcaagcacttcgaacataaggctgaccaccgtacgaagcctaaacatcgcaacgggaaaacagtgtttgctatggttaaagatctaaaagtagtgttcggaaaggggcctggaagccagcctatagagagcgaagatggtcacgcggcgatgtggaaaaagaactctatattttgggagttaccctattgggaattcttggacgtacgccacgcaatcgacgtgatgcacctcactaagaacctttgcgtaaaccttcttagcttcctaggtgtatacggaaagtcgaaagatacactggaagcacgtaatgatctgaagcatatggaacaacgcggcgactttcacccagaaccaaaggagaaaggaagccattacttgagtccagccagctacactcttagcaaggcagagaaggaaagtatgtttgaatacttggagagcataaaggtaccgtctggatactccacgaatatcaagcgaataataagcacgaaggagtaaagatcttttctttagtcccggttgttctcaccaaccgagaggaaagatatctttactcccggttgttctcatcaaccgggaataaagatctaggggtatatatattcccgatgcgcgccctcgtcttctccaccaacacttagaagtttttgcccgatcgatctctctcggcttctccttcgccgccacttcctagggcatccccgcgccgacgccgccaccgtatctcgccgtcgtctcgcgctcgtcgtcgtcaccgccgcctccgcctcctcctccgccgccgcatctctggggtgagagccgacgccgcctccctctcatcagctctctctccgatctcgatctctctctctccctctcggttgccgccggccgcctcgacgccgacgccgacgtcgtcacgacatgacgccgcggcggcacgacacgacgagacgccacaacgccgccgcggcacggcaccggcgccgcgcagcgccaagccgccacgccgccaccgcgcctcgcgctgcaccgccgctgcgcaacgccggcgccgtgccgcgcgcttcgccgccgccgcgcaacgtcgccaccgggccacgcgccacgccgccacgcggccaccgcgccgtcccgccgccgtccgctgccgccacaccgccgtccagctgccgccacaccgccgctccgctgccgccacgacatcgaacgaattaacgtgaactaacgtgaacgagcgaacgaacgtgaacgagaacgagcgaacgaacgtgaacgagaacgtgaatgagcgaacgaacgtgaacgaacgagcgtgaacgaacgtcaacgaacgtgaacgaacgttaacgaatgtgaacgtgaacgtgaaatgcaatataggcaggtgaatgaatgtgaacgaacgaacgtacgtgaatgaaacgtgaccttaacaagaacgcgaacgtgaacgatcgtgaacgaaacgtgaacatcaaatgcaatatatgttacttcgcgtttatcctaatacatctttttgtatcttgcagaaaagacgttgtcggagtcgtccctcaagccggagtggtagctatccctcgaaggaattcgcgcaggcaagtgacgtaattatatatatatgattgttatatttgtaatgcaattaagactattagatttaatatacgacacttagacttagttttaatataagattattatagtttgtaattagactttagtatataatttattgactagctagggtcctataatatacgtcacctagacttagcatatatcactatttgagttttagtataagattattagatttgtaattagacttagcatataagattgtgtagggttctaatatacgacagttacacttagcatacatgactatttgagttttagtataagattatttacgttttaatataagattattatagtttgtaattagactttagtatataatttattgactagctagggtcctataatatacgtcacctagacttagcatatatcactatgtgagttttagtataagattattagatttgtaattatacttagcatataaggttgtgtagggttctaatatacgacagttacacttagcatatatgactatttgagttttagtataagattatttgagttttaatataagattattatatttgtaattagacttagtatataactattgactagctagggtcctataatatacgtcacctagacttagcatttatcactatttgagttttagtataagattatttaagttttaatataagattattagatttgtaattagacttactatataatttattgattagctagggtcctgtaatatacatcacctagacttagcatttatcactatttgagttttagtataagattatttaagttttaatataagattattagatttgtaattagacttactatataatttattgactagctagggtcctgtaatatacgtcacctagacttagcacatgattgttagcatataagattgttaaaacataaatgtctcatgacttagcagctgtttcatgtatgaacagatggctgatcgcgatgaggaacagatattgtacgatacaatcgcggagggaagcagccagtactggaatgaaaaagatgggaaagaggatccaaaccagtatttgaacaaggaagggaacatgtagagggatgcggaggggaaccaggaggggcacgttgaaagggatgtggaggggaaccagaaggaggaggatagtgcaagttaaccctccgctggacagaagagggcacgcgggcaacgaggtgccacgaagaagcttgagggtcggcacatcataacggaagtggacgaagatggccgacctagtgccccggcagaagccgccaagaactatgtacgtcatagcggttgggttgtgcgggataacgtgcctgtcagtacggtgtactggcgcagaacaagggcacgcggagatcatgagagctttgtcccagattcggagaaagagatgctgtggaccacaatgctcgagacattcacccttcccgcaggtacagaggacaaagtgaaaaggtggactctgaagaaaatggcagaacagtttcagagcttcaagggagagttgtacaagaaatatattctgaaggggcagacaccgaacttcgacacattcccaaagctaagggatcactgggacgagttcattgcatataagacaagtgaacaagggcaggcgatgatggaaagaaacaaagaaaatgccgccaagaagaagtaccatcgccacttggggccaggcggctatagcgtcgcgatgccgaagtgggaggagatggaggctaggttgcttgagaggggtatcgaaccggccaccgctaattggccggaacgatcgaagttctggtactatgctcacggtggaacactcaacccagctgatggctcactggtcttcagcgatcagatacgagaggctgcgcgtcgactaacagacacagtggaagcctcttctcagggcacgttctgaccggatagagagagggacgagttgtcactcgccctacagactccagagcatccaggacgaacacaagggaaaggggtgattccttggaagattgggttcaaggaggatatccacacgtacaggagtcggatgaggagcaagagagataccgaggcgaagattgttgatcttgagttcagggtatcgagctacgagctcagcatgcaagaggaggtggcaaggaaggttgatgaacgcatggccgcacatcggtccaatgatccccagccgaccattcctcctgcaatggtgagcccgtcaggaaaccgtagcagctgcgcctcaacggggcaggtaggatcacagagcatggacgccatgcaaacccaagacgaatccacctgccccgttgatgacatcactcagcggacaccatgtgagctgcatattcctttcaagaacttatcaataaaggtaagctcgtagtttatatattttagatttgcccattccgctagttgctgcttatatatgttgattactaataaataacctctcaccacatgaaggtggcgtcgggcatgaccatcccaacggacccttcaggtacttaccactgcaggccgattccagcaggatactccaaggtcgaagttgagttggtcgaaggcgcgtacgaggacctcgaactggattaccctggaggagacggtgagacgcatctacgagacacaagccatgcaattattctatggcgcaggctgtacatcatcctccctgggcgacaagcggcgtctcgtgcaccatcttctctggctccgccatctcctccggctccgccatctcctcctcaggatcctgcaccgtctcctcctcaggatcctgcaccgtctcctcctcatgctccagcaccgtctccacctcaggctcctgcaccgactcctcttcaggctcctgcaccgactcctcctcggtctcctacaccgactcctccgcaagctcctcttccggcaccttcaaagtcaagggccccccaggctccaccgcctgcccacagaagggcaacgaagaaggcaaaaattgacgccgccaagaacaaggacccggggtacgattgcacacaagaggagcttgacgcttacatggcatcagaagtcaagagacaattcaagcctcaaagtccagaaaagaagattcctatagacccgagtgtcatgaacttcttcaggggtatgtctgcacctgccaaggaggccattaagctatcggactatgagcgaacgctgaagaaagcatcttctggaaagtccaaactagtccctcagcttggagagcaaccaaaccaggagatcgagccgttggtgaccggtaaagaaatgacgatagaagaatttattactgacaccggtctaactacggatcaattgctaggagtcacaccaatcgaaaaggcggaagtgaaatacatgtacgaactcggtaaaccgcttgtcaagcctgagctgctgcagtccctacccacacaaatgtacaagttccatccgctgtacatggagatgagcgccaccggtagagagatgatcggagcgaggatcagggacacggacttcttgcaaggagatgacattctctggatcaatttcaagggaatctatgaactataccagctggacgccttcaacgtctctattatgagttgctggattttgtaagtatattgttcagttagatttcttactacgtctcctttaattaattaggtccttgtatataagtagactatagaaaataatatactcccttttatcgttgtagaatggagattcaaagggcccgacggcggggggttttcgatactggattcatcgaccctcggaaagtaaacgtcgcaatgctcgaccaatatccacaagccacagaggacaatctcgtccatctcctgaaggcgcagcattacaagacgttcatactgttgccgtacaacatagagttagtttaattttactgttttcctataccaaatttcattcccgtacgaacttgctaagtgtttcatatgtaatgcatcccacgtacattgcagattccactgggtgcttttactcttcgacctgtcggcctgcaccgtcaacgtatatgactcaatggataaaaaagagtctacgtttgacaaggttttcgaacttatagacaggtaccgtcataagttcctctgttaattaagaaaatcttgttatgttaattgctactatgaatcatagctttaaactccatgtagggcttggtatcggttccgtcatttggtccgcggtaaatggagagaaagacttaggcggaagttcaaatttcctgtgagtacacatgctctacatttatatttctccgattcaaatacatacaagtgtatattaattagatctctcattgtttgtcatttatttgtagtgcgcaaagcaaaagaagggaactaacttgtgcggctattacgtgtgcgagtattgccactgccttgcagaccaaatcatcaccataagaaagctcaatgtacgtacaaataaattcaaaatttcattacgtatcgatttcttgtttaattactaatcaatttcatacattcatatagtttattcgcatgagggataacctgaccacgcacaaggaatttatcgcggcggttcaagaacaactcatgggattcatcaacgaacaaatccttgatcccaagggtgaattctactacgacggaaacacaattcataggtccttagcttctgagctagcgactactactacgtcgaaatcgtagctagctagaacatataatggattgtaattaatacatgactacatatgtttctatatgcatgtgtacacattttctataatgtaaatatattttggtcatatatatatacatatgcatttgcataacatatatatgtataaatacatatatattatgcacatgtacatatgtattatatatatatatatatatatatatatatatatatatatatatatatatatgtatgtactgaaacatggtttatatatatatatatatatatatatataaaccatgcagcaacagggccatgcaaaaaaaaaggtcagctcgatctttagtcccggttggtaacaccaaccgagacggatgagccatctttagtctcggttggtaacccaaaccaggactaaagatcgatctttactcctggttaggtagatgcccggtttgggttaccaaccgggactaaaaatcgatctttagtcccgattatttcacccgggactaaagatagcgatctttagtcccggattggtaatcccggtttggaaaccgggattaaaaggggttataaaccaggactataaagggtttctccaccagtgtatcgcccagtcctaagctaagtacgtctccgttttatctgccgtgcgtagtgtatttttttcttttagcgtcggtgttccaccgtgttagcttgaagccacgcgaggcgtgagtgacacgagacccagagcagctgaccggctgcctcgtctaccacattaatctggacaactggattataagtaagatattgagtcgatactgaattactggtggtcaactgtttaattgcacacatacatgatcaattgaatataactatcatctatctattatattattaaaagaataaaaaaatgagcctccacgttcgctctcatggcctagaaattctcacgttaatcggagaaaaagaaaaagcagagtctatatagaaatacaatttagaaatagctgaaattcggaattaaaaaataaggaatattagaagaggagactagagtccatatagaaatacaatttagaaatagtttaaattcggaattaaaaaataaggaatattagaagaggagactagagtccatatagaaatacaattaggaaataactgaaattcagaattaaaaataaggaatattagaagtagagtatagagtccatgcagaaatacaattaggaaataactgaaattcggaattaaaaataaggaatattagaagtagagtatagagtccatatagaaatacaattaggaaataactgaaattcggaattaaaaataaggaatagaagtagagtatagagtccatatagaaatacaattaagaaaaaaaatagatattcggaattaaaaaataaggaatattagaggttgagtatatagtctatataggaatttaaaactaactaaaatttggaatgaatataataaaattaaaagtagagtttagagtccttataaaaatacaatttacaaataactaaaattcgaaattaagaaaaacatgggaagaagagtttaaagtcaatataggaatacaatttagaagtaactggaattcgaaattaaaaattaaagaatattgaaagatgagtttagagtccacatagaaataaaattagaaataataaaaattcagaaataaaaataaataatattagaagaagagcatagagtctatatagaaatacaatttacagaaaattcggaattaaaaaaaagaaatacgagtctagagtacatataagaatatatataatttacaaataactaaaatttgatattaaaaataattaataattaacacgtatataaaatataatatgaatattacacattagtagttttgtaaagttattgcaaaatttaaaattatgttgtcattttaatatatttgaataatataatgataaaacatatatgctattatatgagagaaaatataatgatgctagccgcgcaatctacgtagctcacgatgctagttaatataatctactaattaaaatagtcgattgaataaaaataaatttagagccctaatttacgtttcgttctggggcccactgatctcacctcggtggaatcgggctcggcggcgagagcgaactcggtcggcgccccctcccattccacctgcgcacgggccaagcgcggggcgtggccggcgagctcccgtccattccctcgtctctctggataggggatctggaaaatttgctgctctcttgatcgagcggtgaaactttctcaccattcatccatccggcgaaacttccactgatgaatcggacttcccaaacctttccacgctctcgctccaaatgaccaaaagccagaggaggagggtttcgcagcaacaacgtgggcgcccacggcccgcgcccggtcagcgaggaaacagatcgaaaaaaaacaaaagccgctgacgtcacgatctcgaggctcgcgattcccaacaatctctttaaaaagcttcctctcgccgaatccccctccacctccaccacccgccgccgccgccgccgccgccgccatggcctccgacctgcgcccgccggagcaccaggtggcggggcaccgcgcgtccgccgacaagctgggcccgctcgtcgacggcgaggggctcttctacaagcccctccaggccggggagcgcggggagcacgaggccgccttctacgccgcgttcaccgcgcacccggccgtcccgccccgggtccggggcgccttcttcccgcgcttccacggcacccgcttcctcccggccccagccagccccggcggcgcgccctacccgcacatcgtcctcgacgacctcctcgcgggcctcccgtccccctgcgtcgccgacgtcaagatcggcgcctgcacgtggccgccgcgatccccggacccctacgtcgccaagtgcctcgccaaggaccgcgagaccaccagcgcgctcctcggcttccgcgtctccggcgtccgggtggtcgatgcccggggcggcgccgtgtggcgcccggaccggtcggagctgaaggggatcgacgccgccggggtccgccgcgtgctccgccgctacgtgtccacgggcggcggcgacggcctggactgcgcgctcgccgccgcggtgtacggaggggagggcggcgtcctggctcagctgcgggagctcaaggcgtggttcgaggagcaaaccctgtaccacttctactcggcgtcgattctgttcggctacgacgccaatgcggcggcggcggctgctcccggaggtggaagcggcggtgtaagggtgaagctggtggacttcgcgcatgtcgacgatggggacggggtgattgaccacaacttcttgggcgggctctgctcgctcatcaagttcatcggcgacattgtcgccgaggttaccgagaaggcgtcttcagatcattcttgaaaattttgtcagcttggagatcagatgattaaacggtaaagcaatgcccctctatgttttgttctttttgttttgttagatttggatgacaatgttagacattgagtcagtaaacaaaaggaggatgtaaagcaaaacggcaaatctcttgtgtcttggattatgttctatactgatggaagaagattaaagtataaacagaaaaagtgtcactgtggtctgggggatgcatgaacttgaaaaggagtagaattaaatatttatttaatttattgcaagaaagagtagtagtagaatattgccactttaatgaaagttatgatgctacgaaacaaagaattggttgctatgcatctagagaacctggaattagtgccgaggtccacttgttatagatggagaaagaatgtgagaaaattgtgagccaactgcctcgtctatgacatgtgggtccaccctgtattggatacaatttggatgccaaattggttaagaacaaagccaaaccagtgaaaggagatttagatggttgagggacgaggtttaccaggttttgaagttgaggaaaaattaaactgagtaaagagttgagatactagaaatagacgttttctagtttaattgaaaaaaacctggacactgcattgatctatactatactgttcacatcctcacagctgactggttctgaaattatttgttatggcttcgattgtcttgtgcttccttaataaagatctgatgttgggtggatgttgtcctttgtgccatacccaaaatgaagtcctagtgagattgagactgtccattgaggcaatttataaactattttgcttaggtaccgtctaaactctaaaaagcataccatttggtactctgtttaatcattttctcttcttactcaataaaagcgataagacttgttctagtgatccccttttgaatatttctcatgcttcaatcccttcaatgctggcttcagcggctaactagctatgtagtaatatgtacttgctacattgactatatgtcagctaaaaacgtacttacaatttaaatcacaagcttatatagttaatattgactataccatgctattgctagttaacttttcacagaatatgtcatgtacggtttagtgcaatattgttacaagtaacaatatagcaataagtgcagtaagcaagctatgataccttgagtccatgataaaagggagcgatgatagtttactatgtcttttgttcaccagtcaccatgggtccatggcttgtattgtagactaatggccaacactaactccaaaaccgctgatgacaaatgtgatactccaatcactagtttaaggaaaaaaaaaacaatgtcctacttaaacttgggtggaataattggaactcacagataatagagataactaggttggttcatctacctaacatattgagtctggatgatccctttcagatgcagtaatgaattccaccataactatgggaacatatgcttgaaatgcaggattgcttgagatattccatggaaggtaaagtgaggctgaagaaagtctgtaattaatgtgacagaaaactcaatacaagccacaaagtattatgctttgcagccaaactgaggtgcctgagtatgcacacacttattttatcagtgcatgctattactaactttagggaatgcgagagaatatgtagtatgtgcacactcttttataatgatgctataaaatgtggatgggcaactcatgcttgagttcaatttttcagataaaaacagctgactgtaaccttgtcattgttttgatatcgataaagtgattggtgagagagtttatccgtgtttgctttgctgggcgaacaacgtagtcaactgatttcacacttctcacctcattaattatattgaagtaatttaggccatgcctagttccaaactttttcttcaaacttccaacttttccatcacatcaaaactttcctacacacacaaacttctaactattccgtcacatcgttccaatttcaccaaacttctaattttggcttgaactaaacacacccttagtcaactaccttgctactactgcagtaaactgttgttcccacatgaagtttcactcttttgtctgttgattacggagtttatgagtactcatgtgtatactgggtttgttcttgcaggtccaacattgtgttcttgcaaatgtcacacataataaagtgccatcaaatggagaaagagtcaattgtttgaaagaggaaacttcaccgagctgccggtaacgtaaatgcgaagcgactcaccggcagctctcccggcaaacttacggcaactgatacctttttttgcatacccccctttaaaaccatgggattcggggtgcattggatcttactctttagttgtattaaagaaatggtgaacaaaagatgggcgttgtcattccaccgagaaagagttctttcgctatatttcatacttgcagtctcatagggaattttgcaaagaattgtccgagcatcattgcaggccaaacacctgccttttctgaaaacatatttatacgaacagacatctaacgaatgtttttcttgtatgaaagtcgaccataagcaccaaactctgatattcgaaacctagtggtgtggtattaaccattttgtgtaattttagcgactttggctgtgttctttccctcactttcctaatttttactccctcgtttttcacacacgtactttttaaacggttaaacggtgtatttttttgcaaaagttttctaaagaaaagatatttttttaaaaaaatcatattaatttatttttcaagtttttttaagactaatacttaatcaatcatgtggtaatgggaattccacttcccaaaagcagcctctgtatgggttcatttgaaagaaaaggaggatgaattattataaagctatatagtattacaaaactatcataaccaaactattataaagctatatagacttagtattacaaaattatagatgtggcaccggatctattatgctaccaatttaaggtcaagtaccttaaaaccatatgtctagtaaaaaaattagtagtgaaacaaagctatagattttagagtttagtttcctactgctattgttctgctgaagttataaacactatagttttacgatataatttggcactgaatctttagtcttacggtattatgcctcaaatttgatgataagccccaatgctaaaccggtagaaagcgcgcaaaacctcttgccaaattcaccttaacaaaattgtttctcaaaagcgctaaatcacggaaccaacatggcaacatgggtggttcactcttggaattcgcacgcagatgcacgcagctagtagtaggcgtgttgatccagcgactgaagcagcagcgcagcactcatgtgagacggtgagagtctggatgatgactggcgactttgttaggactcgggaccagatgagcatgagctgcctgcctccctcccacgacccacgcacatcgcgatcgaccttgctttggcacgtgatgatgttacactgttctctactttcttcgtttcataaaatacgaacctctagttctattactatcatttttgtatttcataaaacggagtaaatagacaatagtgtaccatcacataataatagtaatagtactagagtttttttttttcttttatgaaactactctacccgtcccataatataagatattttagagggatatgacatattctagtgctacgaactgggatagagatgtgtcacattctttcaaaattctataaagtctatcaccggtctctaacttgtaccgctgtgtcatcctggtccctaaactcgcaaatcgatcgtttaggtcctcaaacttgttcgactgtgttatcccggtccctaaacttacagaactctcgttcaggtcctccaacttgttcagttgtgtcaccccggtccctaaacaggacggtctaaaatctttatatcaaaaagtaattcataactttttcatgtgaactctaattaagacaaactttatatcaaaattgtagccctcgacgcgacctacaactttgtagttgaaaagtttttgaattaaaactgtttagggtcccaaaatattgttgcatgttatagattttgaaattttaattttaaaattacattttgggacaaaaaatgacttaaaataaaaaaattcaactacaaagttgtagatcgcatcgagggctaccagtttgatataaagtttgtcttcattagagttcacataaaaaagttatgaattatttttaaatataaagtctttagactgtctgtcctatttgacccagatgatattcaaatccaaatttagggaccggtgtgacacaactgaataagttggaggatctaaacgagtgatctgtaagtttagggaccgggatgacacagtcgaacaaatttgaggacctgaacggtcgatttgcgagtttagggaccaggatgacacaacggtataagtttagagaccggtaatggactttaatcttttttatattttgggacggatgagttactgcactactaataactccactccacttggatcgtgcagtgcaggggcgcatgctggagagaagagaattggggggggggggggggggggtggtttggtggatcgccacctggagttggcgttgcgctgtgcgagagcggttggctcttgtctggttgctgctgagcttttaattccacgccgagcgcgcaggcggtgatttttgaagcgcattccggcatcgccatcggtttcatcgatcgatcgtcagattcgccaactcccaccgccaccggccgaaccaacctcagccacaacacctctttctgccttcatatatatgcatcggaattttggatgtgattgcctgcatcggatggattacgaccactcgtacattgcatatttggatgcagattcatgttgtactattctgcggcagccggaatcgggatgagctgcacagcagcgagcgccgagcgggcgtggatttgataatggaataagctcatataatgtcccttaacttgtcaacgaattcgattttcatccttgaaccccaaaaccagatataacgggtcccccaactattaaaaccggtgcagataaggtccttcggcggtttagatggcggttttggctgacgtggcgtctacgtgacgaatttgactcggtcttcatctgacgtgtcattgacatggtgcttacgtggcaattcgaaaaaaaaaacccttgagacccacatatcagtttcatatacaaattaataaaaatggtgggacccacgtgggccccacgagtcattctcacccctcatcttctttctcctgatctctccccatctctcgtcgtcttcatctctctcccctctcctccctcctctcgctggcacagataagaagcggcgcacgggcgccggccggagggaggaaaggagcgcgcgcatgcgcaggaggcggccggcgaccggtgagaaaggagcggcgtcctccgctaggagaaggacgcacacctcaccatcgcggcccccgccaccgtttccaccgtcctccgcgccgctcaccgacctcgacggcgtcctcgctatgggcggtggcgggcgagctcccgcttctctccacctacttccccgccgccgctatcgaagacgacgacactgatggcgacgggtttgaggagggcaccgggccaccgatgcggcgattgggcgtcggcggcgcgggagcagtgcagtggcggcgcgcggggccacagggtgcaagcggcggcggcgtcaaggagggccagggcgcaagcggtagtgactagtgactggcggtagtggcgcaggagcagggcgtcgggacgcaagcggcgccatggaggagggcatcatcggcgtcgggcgccatttatctggtcggccaccagcttccggaagcgaatggtgagcacgtcgccattttctccttctcccctctccacgatttcacagggattggaaactgcttgctgcagttgctgttcgattctatttctacaattctactcacgatacaatccattatttccctcagtaaatcccgttgaaatttgaacaaaattcagtgccaaaatgtttactcacatcacactgttgcagcatgacaaacaaatgttcgatctacacacttacgaaccaccggatttcggcggcggctactgcggcgtcgtagtgcagattcatcaccctgacgaggctgctaccgtcctcgccgtacctgatgaggtggccgtacatccgcagccagtggtcggaagcctcgtcgacggtgtggtaggtccagatgtgtggtctcagccagaggcagtcgatgaggtcaccccacgcgcctcgttttccatgctgatagtggctctggtgctccagtcgcgggcgaggccgacgcagccgcagccgcagccggcacacgacaccattgaaggtccgtgacgcgcctgtcgtcggaccggatatcggcgacgccgaggccgggcaagcactcgacgaggtcagccgccgaagcaggtagaggggctggagatcatcgaagtggccaccggtgagcggttgtcccgctggcttcgtgcgccgccgctccggccaccgtcgccccactccgcccgccgccctagtccacatcataggaaagaagagagagagagaggatagcaggaagaagggagcagtgaggatgacacgtggggcccacgtgggtcccaccatttttttttttgtgaaactgacatgtaggccccactaattttattatttttctggatcgaattgccatgtaagcgccacgccagccaaaaccgccctctaaaccgccagaggaacttatctgcaccggttttgatagttgagggatccgttgtatctggttttggggttcaaggacgaaaatcggattcgttgacaagttaagggacctcggatgaacttattcctttgataattaggcatttaggccggcccaattagtatactcggcccggtgacacaacccagccaagcctcacgtttggcccacatagagttcaggcccatcggccgccgcttaaacagtacaccgaactccaaaacgtacaaccgcatcgggcgcattaaatgtctgtgcatcacgtacaaccgcatgcaatgccagtcttccgtaaacaacacctactactacagtactagctcttgaatcttgattgtttagatatactagtacagagtaaatctcagtattaatatataatggatatgctatacttgaactctagcttgaactaatcttgattgaaacaatgtcacggagagtacatgtgacgtgatgttcacagaagaacacaacttctaaccgttgtcggagattcagatctagagagagacttgcagcactccatcccgtcctaaaattatacatgtagtactacggcctggtttagttttcaactttttctttaaatttttaactttttcatcaaacttttccacacacagacttccaatttttccgtcacatcattccaatttcaatcaaacttttaattttagcgtgaactaaacacaccctacataggtaaaattctatattttgttactggccaaacctatatactccctccgtccgataatataagggattttgaaggatatctcttatatcataggatgaagggaatagtaataaattgtccctgcatctaaagtctagtataacaaaagagtgagtaaattttagttcaggccttcttaatttaatatttattagccaaagtttcataaaagatgaaagtatatgacctatttttctaccgcatatatttattccatccggttccataatttttaacattttggttaagtctaagattaagcttttataactttaactattaataactttaaaatatttagtttgaggggcactggaataaaataattaaataacttcaaaaatatttagtttaaaagacgatttgtcttacaaagtactatgataaaaattaaatgtatttatttattatatatattatattaaaaaataattaaaaatgcattccagagactgtgttcttatgtaaaatatgaacaaaagaaaataccattgtctgtactttaggcaggattggacattaatgatgatactacctagcagctctatatcaccacatatatttaatattgtgttgtactttagactgagttagggaatgacgtgaaactttagctaatgaacttgtacatgctgtttcctgtatgcatatttgtatactgtacaatcaataataacattattttcttaatagatgatgccgttaacttttaaacatatatttgatcattccttttatttataaaaacttatagaattatcatctattttgctatgagttttttaaaataatgtttaatcatgatttaattatatcttactacatccgtcccaaaatataaacatttttagctatgaatctagacaaacaattatccagattcatagctaaaaatgcttatattttgaaatagagggagtatgtatttttgtacataatttttaaataatatagatagtaaagcgtgtactgcaaagttgaaagtgtcactattagaaaacgaaataagaagtatacagctagctagtagtataggctatacagagatatgttcagattcttagtattagtagtattaggatatattacatcggtactagattgattttctatagcatgaaggagtatctaacttagggatgggtgtgatgtttttgctgtgtcgtcgataccagctcgtcgtcggtggcagccgtgcaaagagcgatggtggtagctggccagactgttttggtcgctcgcgagttgctaatcctactccgtacattcatgtcagggagagaacatgtgtgcctgatggaccatactcctactatactccagctaaactgaaacaataatgtgtatcagtgtcagactgtcagtgtgatcagcgtcagcgtcagtctcctgcttgatcagcagtagcatgtcatggttcgatcgaagtgcatgcatgctgctttactgttaatgcagttgcaactactcgatcaggcgttgtttacgcagcaacatatggaagtttatggcatgtaacgttgtcctgatttccacttgcagatttcgcccacaaatctaaattaacagctggagttgtggattatccttgctatatgcttttaaaaacacaattttctcataaacttgtactgcatcagtatagcttattagatagctttctctaagctatctattactgtagctttataatgtatccatatcagtaattttgtgttatccataatctatcaattatgggaacacctttattatcgtccgttctacattataggtcaccctcatgatcatatattttgtatgatacgattcaatccgtactactactattactactcctactccataaggttctttgaattggagtactgaacaaaaatacaaaccaagtcaaagagagcatcctgcagatatgtctgaacatgtgagtactaacaccttcacaaaaaaaaaaaagatatgcgggcttctgatttcagatttgttctatgcaactactacatatatttatatacccagagacaccttgggccaggaaaatcaagtgcaagtagctggtatatagtagttcgtcctgaccaacgatcaatgacgaccaaacacttatggatcgatcagagtggatgttaatgtgattatataataattttttattaagtggctacctggctgcaggtgccggtgtcgtgacggcagggtgttcgatcggcctgagaacgatatgatcaggccagtagtcagcacacgctgatcgatctcgagttgtctcgaggccaccttgctttgtcgccatcgatcgtctcatcatcatttcttgcatgaagcattacatctaaacaatatcgtcagtaacatgtccatgttgcaagctagtccacgctaattaagttgaccgatcgaataattgacaatatctttaagaaagggaaaaagtacgaattaccccctaactatcgcgatcgtctgaattactcccccgaaccacaaaaccgggtattcttcacccccaactatacaaaccggacaaattacctctctcgacccaatccgcggtggttttggtccacgtgacgtacgtgtggcagtccagtcagcactctatttattaaaaaatatgagacccacctgtcatctcctcatcctctcttcctctctcttctctctctcactctcacacacactctctctctcaaacgcgtcgtgcggggaaggacgccgacgtcgacgccgatgtcgacgccgacgtcgacgtcgacgtcgacgtcgacagaggagccgacgtcgacgccggcaggcgggcgcagaggcagcggcgggttacgggcgggagaggagcggacgctgacgggcggccggtggcggggatggctatgggcgttgtaggggcggaggccggaggcgggcgggcgcggaggccgaggcctcgacgccggccgtcccgccgccctcgtcctccccgcgcgcacgccgccgagaggcgccgccgccgtgcactccatccttgtcgtcgtccttctcatccccccacgagctagccagcggtggaggtgggggcgccgtcggagcggcgcggcggagggggcctcgacgccggccgtcccgcctccctcgtcctccccgcgcgcacgctgccgagaggcgcagccgccgtgtgctccatccttgtcgtcgtcctcctcatccccccacgagctggccagcggtggaggtgggggcaccgtcggagcggtgcggcggagggggccttgacaccggctgtcccgccgccctcgtccttcccgcgcgcacgccgccgagaggcgccgccgccgtgtgctccatcctcgtcgtcgtcctcctcatcccccctcgtcggcgcccccaccgccgccgcgtcctccccggcgctccgccatcacccgcccgccgccgccgcgtcctctccggcgctccgccaccgcccgcacgccgccgccgcgtcctcccccgcacggcgggtgagagagaggaagagagacagaagagagaggaagagaggatgaggagatgacaggtgggtctcatattttttttttataaatagagtgctgattggactgccacgcgtacgccacgtggaccaaaaccaccgcggattgggtccaggggggtaatttatcctgtttacatagttgggggtgaagaatacccggttttgtggttcagggggattcaaacgacccgaccgtgatagttcgggggataatttgtactttttccttaagaaagcaatcaagcaattcgatcatcaagcaaagcatagataggtcgatcgatcgatcgctggtacgtaaggtaagatggtccacaattaattaagcaaatcactgtccttgatctcgatctctctctagcattagccgcccatctaatcgtatagtaaaaaactgtttggctcaagtatacgtctagtcgtacgtagtacggctgcaagtctgcaactttgcgagacaaagaagagaatctgtcactagcttgattaggttgccggacccgcatgaagcattgatccgatcgagaggcagacaaggaaagcactgaaaatgagacatgcactcacggagagtactcgtaggccattcacaacgcacacacacgacgtatggtaatattaatccacgtagacaaatcgcttgtgtggagaagagagaagagtgggaaccattccctcgccagctttgcgtgaccaaagttggataagaacggtggatgacaagaaagcgaaagagagagaaatggtaagaacggtggatgactgaagagagaagttcgtcgaagtagggacgctcgggggagctcgccgccgctgcgtggactcggggaagctgacgccgccgccatcgctgcttgggcttggggtagccgagataggatgccgaagagggaggggataggcaaccgatgctattgagcaactgccgccaccgctttctcctaagcggcaccgatggtgttcggggaggggggcaccagatctacgccgctagtgggaatggaggtggtgggggagtcgccatcgtgcgtcgccagtggaagaaaaggagggggtagaggagtcgtcgccgtgcgccgctgtgggagaggacggagaggaggagggcaggggatcgggggggggagggctaatgggcgggtgatcgcccccccaccctcctattcactattcttccttcctcctccccttcttctcttcctactacaccataagtttttaaaaaataaaaaagacaaggttgaaaattttatgtatagaaatactatatataaaaaatttgaataatttaaattcaaatttgaatcgagtatgtaaacttttgacttataaactttgggtccataaagtttaggtgtataaactttagatgtataaaatactatatataaaatatattcgaattcaaattcaaatttgaatcgggtatgtaaacttttgacttataaactttgggtctataaactttaggtgtataaactttaaatgtatagaaatactatatataaaaaatatttgaattcaaattcaaatttgaatcggatatataaacttttgatttataaactttaagtctctaaattttagacgtgtaaacttaaggtgtacaaactttaggtaaataaatttactaaaataggaaagtaatgcggtgccaaaaaatgaaaccaagtggagaaaagggggggcgcccaggatcgatcgccccttagggcaagttttataaaagaggtggatgttgcatctaatcttgaccacatcatcaactaataaatgtagagataacatgtacagtatatcacatatatactaattctaatacactagccccaatgtttgtttgcccaatctactcttcctctctctctttttatcttgaattttgtgtagtggatgcctcttgcatgagaggtggctctttatctctctcatctcttctctccttcacctcactatttaaacttatgtggcacctaagagattgtgtttggatgtccatagtacttgcccttagcatttctaggggatcggtgccttgggagccaagtgagggagaggagagagagagatgggaagaagcggcggaagttgggatgtgcgagcgattcttctctgcaggaggagataacgatttttttttggtgggacctgcttgaaaaaaaaattgatggtagacctcatctaaagctacgcgcgctgggagatggagcctcatttacttttttcctacatgatgcttgtgcttcttggtgagccgggacacatttgctattgcctgtagagtggtacgcctagtacgtacgaggcaggagacagattagcagctgcgtgctttcctctccatctgatggtgacggggatggccacgattaagttggaggaattaattcaatcgattggggtgaactgatcaagtgaaagcatgaacgagtcggtacgaattaatgagaggaggagatctgcgacgtgggtaaagattagaggagggacatgtgggcgtggggctcattgatggatgttcgcttcaaaatataataagctttgactatgaatttatttagatgtatgtattcagttttgtaactaaaatttattatattttgaaattagaaatcatggagatatagagttgtagttgtatttttctacggtactaccagtattggtaggggcgatgaatgtccgtgtcttaggcctcggctagcagaagtgaacaaatatagttcagagtttagatctccttcgaaatagataaatttactaggaattttataagaattgaactaatttatatgatatttctgtgttccaacaaagacgtccacgacgtagcgtcaaaatcaatacttctaaagctggcattggaacttacaaatcgattggttcaaggaacttacaaatcgattggttcaagtgatagagctaaacttttgagataaatctagaaattatataagaggaaaaaatcaagaaaaagaaagcatcgtctcgatctagcacatgctagatgttttccaactaggtagaatagtatgtatctgataccttgaaattatagaaatttgtcctcattcaatcgatgataattggaatgattagggagaaaattagagattaaaaaatgatatttaaaattttaaaataaattagataatctctattaaagtcctctaaacttaatgtgttgtaaattaactctaaatatacatgggctatataatactcgtaccaacaaaaaaacataaaaaagggtgtgactatgatcacatactctttatttaattaattatgttcaaaatgataaaggatttattaaggataagtcttgcattttctccccctttgactcaaaaccggtcacgcattaggataataaatccatcgattatttagttggttatatagatggccaaaaggcccgaggcccgacggcccggccgatggcacggcgtttaggcccggcccaagcatggcacggcccgtcaagggtcgggcccgtgctggcccaacccggccaacgggccgtgcctgggcctcttcgccagcacgttgggccggcacggcacgatgggccgcatgccaggcccgacacataaacaatagggagtaaaaatagacatattatatgccacggtcgaaagaatagggatgcaaaatagacttattttacctatatatatgtcagcccaaagaggagggacggaaaatagacttatttttactatatatatatatatatatatatatatatatatatatatgtcacagcccaaagaggagggatggcaaatagatttattttcgctatattatgtcatagccaaagaggatggatgaaaaatagacttatttaaaaaaatggcacgatgggccacccgcgcctttgggccggcccggcacggcccaacggcgggtgggccgtgcctgggcgggaggcgcagcccatgggcacggcccgatggctggtgggccgtgcttggccgtgcctgggccgggccgtgccgggcgggtcttttggccatctgtagttggttagtcttatttattaaaatgagcgattttatctgccttcgatgactaatattgaacacttgttattgtaacatgattttcacacattcattatctgccaccggaaaataaggctcccatcctttggcttattcacggaataagccaaacgacatatttgtaaatgaaaaataatttgtgaataaaacttttatatacgtgttctttgcgatctaaaaacaaaggcaaaaaaataaacttcgatgaaaaaaccctaaaatcaactccaaatttaaggttgaaaattcaaaatttggatgataagcataagaataagcgaaaatatggggttgcaaacttatttgtccatctacaatgccaaaaactgaaagttcaactaaatgatattgacatacatggatataaaatataggcatgccaactggcatgctgattttctatttatcataactactgtcaatgtgaattaagatttcacctgttaagatgagggcttctttgctttcataattaatactattaccgtcactaagattatttatcctatactcctacagtatcagtgacttgtggtggtgagtactccttccgtctaaaaaaagataacttaaggggtgtcgaattaccatctagattacttttttttagccaaatttagtttcaaactttttctttaaacttccaacttttctatcacattaaaactttcctacacacaaacttctaacttctccgtcacatcgttttaattttaattaaatttctaattttgatgtgaactaaacacatccttaatatagagagagtaggcgtcagtacgttggaaggcatttgacaacgtaataccgctagtagctacgtactccacttgtttagtgttaatttgacactactttgctgacatacggcactggttgaagtggatgtggatttgcaaacgatgaagagcaggatataaaaattgctggtccactgattgaagtggtaaagtgaagtagtactgtgcatgatgcaagatcatccaagaacatttcaaagtccaggcctggcttgttcaatctcatatatggatgctaagactggtagagaagtgctttttactttcggttcgtaactctccagtagtccccgtttttcaaccggaactacgaatccgggactaaagatcgctatctttagtcccggtcaaataaccgggagcgatctttagtcccggttcggttcaaataaccgggactaaagagagggatctttagtgggagtaaagagagaatagcggcagtcccagatggtccctgtcacaccccaatccggcaccgccgtacaacggcacttgataggagcgtgtcgtaggaaaaacagcgcgagccgcttcctacgaaaccgcgatctcagtaccagtcccaggatgtagcgctggtacccacggtgacaaatatgaatcattgcaatccttaaaataaatagaggacttatttaccttaacttaggttgcagctcagacagcccgagaatgcaaccgacgacacggacgaggcaaacaccaacaacagtggcagcagcggaaccaacggtctaacacccaacaccacaggcagcagcagggaactaggacaaaaccctaatctttacttcacttcaacttcatcttcagagctagcagaactatatttatatagagcaagggtgagtacttacgtactcagcaagccaggggaacttaggtggttaatgcaagcttcaagggaaggctggttaatttagcaatcaattttgttttcaagattttcaacaatctaagtgtgtgctttccacaaccagagcgagacaagtcttagctcggtcggggtgagaagtaacaaatttatttatcaaaatctttcaaatctggtttttccaaaccaaaccaacttttccaaacttcccgataatagtggtccccaaatgaccaatcacttccagggactcccggtcccgctgtctcccggacagctaattgcttcccaagcattaggtttccctaaccttaacaccttttcataaaacagggtaaaacaaaaactacgctaaggaatcacctcacatccgcccatgaccgtgggcacgactgttcgaacagtttgttaacctctgcagagggggtacactttacccacacgacattactaacccgaatcactcagcccgtgcagaacggccacgtctggtgacctaagggctttcatgacaaggcatttcgagagcagacacagggttgccatatgccgacgagaggggtcccagaccaacaataggttaggtcctagaccatactatgccatatgtctctcggcatcaaggctcccccgattagcaatttactcagccaggggtgtcccattccacctgtgtggtcgcactattgtatgctcggatgtaattccgaaggaatcggtccttaaatgcgaccacacatgcattccgcccaggaatggccttgtgtcgcgagttttatttttaaaactcattttctttcacaaggcaccgactcaggcgtcgggttttccaatccttttgtaaaccaagatttacccaagaagttactcaaattttaagtttgaaggcgaccgtcgatactcgcacaaagtgcacgaatatcgaggcgcaactagatggttacaagggaacatgatataacaatcacaatggaaggatcaaatgcaacaagttaggtagtcccgccaatctgcctcgcagacggggcaagcagattgagtgcaatcctatcattgcataatatttttcaagcaatataattaagttcaaatataggctcaagatgttcaaaggtggcttgccttgctcagggtcttcacggagcttcgcgaatcttcgagatatccacgattgacggaaaatccggtaaccgcaactacgcaaacaatcaaaaacctaaacaaaagaccaagaaaaggatcctatttagactaaataatagtgccattaaatagatctcaattttacggaattattggaagtggaacggggtcaatcggagttacggatcgggagatatggattttggaagtttaattggaatttatagaaataatattctcaagaatattattgacagtcactggtgtgcgagaccaaggaaaatgattcatgggattttggaatagagaaatgatttatggaataggggaaaaagggtttattaaatcccttgaaaaagaaaggaaggagggatgccatatagacttcctcgggcggcttaggcgtggcccgaggggtttatgcggcttggccggacctaatgggccggcgcgggcgcgggaggggcggcccaagagagggggcgcggggagagagaggccgacgcgggtggacgcggtccaccgcgcgggacccacatggcggtggttgggttcacggtggggagggcgcacgcggggtgcggcgctagggtttcgggtgcgcgtggcttaggaacggtgcaccgggtggagaaacggcggcgggcccacgagcagccgcatggcgcaccgtggtccgcgcgctcggatggggaaagcggggttggccagtttgactcggtctagccgacgtggcgcctacgtggcagccacgcgggccggtcggaggaggaagaaaagggaggccgagacggacggcggacagcggccgagttctccggagccttgcgggacggatttggtcttcggggagcacaccggagtgacgagggattcgaaacggagcgatccaacggctcggattcgccggagagaggccagcgacgatgaatcgtggcggcgcatgccggcggcgagaaaagggggaaaaatccaccggagcaatgggagttcgattcggcggggtgggagcatctccgatgttcaaggggtgcattcccggcgtcggatggggtagagaagtaccgaggagggccggcgacgggcggcggcctccgggatcggacggcaatggcggcggggccatgccgggcggcggcggggcttggggcagcgtccacgcgcgttcaggagggctatagagccgctacgcaagctggagtggaagaggaaaagcggggagggagaacgggggctaccgcgtcgggagatcactgggaagagcgtccgacggcgcggcgggatcgcctcggcctcgggccggggaagaggaaggagacggcgcccggaggtccccttcggctccgcgcgcttgccgactttccggcacgcgcaacggcgaggaaggtggtggcggcaaggcggcaagaacagaggaagagcggggagcggcttggcttttataggtggagaagaggcggtttagtagggggaaccgacttagatggtcaagggagctcggctgtcgcgtgtggtcaaggtgggggcggcgaacttggcagtcacgggcggcagagggggggtcgatggtgcctgtcggggaaaaagcaaaaaggggagggaggaaagggggctctgcccatgccattctgggaaaaaggaggagggagagagagctctgcctccgggagttggacgcacacgacttggagcggccgggcatgcggcaacagggcacgggcggcatctggacggacgcggcgacgactgagcgcggcgaccgaccgagcgtggttggccacgcgcgggcgcgcgcgcggggaaccgacgggcggcggcgaaaattgaatgtcagtttgaatcggcggggcgctggcggggagcggtttgggcgcgacgagggagagagagagagaacgagagagagagagaacgtccgagagaggggagagagacggcgctctctctcggtggtcacgcgcggcgcacgtggagagaggaggaaatggactgagagagagtgatgggccgagggagaggaattcggcccacaaaagcagagggaggcaaaatagactttttttagatggattgaatgtggagacaatttgaattggagggaatttgagaaggattttggaatttaaccttgatacttggactctaggaacaataaggaagagtcgaagaaggattcaaagcgggaattgaatatttttgtagtcggagcgaatattcggcaaggattcaaaggaagggatcgactttctggattgaattcaaattggatatttgagctcaacaaagtttggagaagccaaggagaggattcaaagagcgaatttgatactttcggaaatgggaaggaatttcgatgaggcatgattctcgatgtcgatgggaagttggagttcaaagcgagaatttctattctagggatatatttgtatttggtggctcaaggattattgagagggggggtttaaagaaatcttgtaccttgggacaaatatttgggaaggagttcaaggatagatagatagacagagagataggttgataggtagaggaacggatagacagatggatagataaacagatagataggtatagtagatagatagatggatcgatagatagatagatcgttaggtagatcgatgtatagatagattgataggtagataggttgataggtcgagactcagagagagacgggatggaagagaaggaagaggtggaccggaagaaaggaagaaggaatccaacctatgggggaggttaaatagacttttactaagagatttaattgggaggttttagggttggagtctggactcgaatttcgaagtcgatactcggttttgggagaatagaaaggagtcaaggaagagaacaatattcggagacgagtcaaagggagatggataatttagagaaagagagtgtaacttgggagtttgagtttgactacttgatgagatatgcgggtgaggattttgaagagaagtctgaatagaagggttcggacttcgagattttttcagaacggatatcattttgggaagagctcaaggcgaaagggattgaatcttggggtttagagttcaagggtggaagtgatcttgatttgcatattcagacttgggtcagaagttcgagaaagagaactagggtagattgacgaaccaatacagagagaaagatagatgaatcaaaacctgagaggttgaattcgaatttgagaatcggtttgaaggaaccaaggagagagtttatgacgtgaaggtgaatccttggacggagttagggttcgggcattcgacaaagttcacagatggggttccaggaggggattccgaatagaaggaatcgagcttcgggactatattgggatggaaattttaaggagacgatctttgataacagggtatcgagacaagggagggatttaaattgagatctttggcacaacttagacttaacactcaaagaacgaaattttcgcaattaggattttcaataaattagcttttaacgtcccgcagaaagcggagcgttacagtccccttttcttttttttattttctcctaaataaagtgggatgcatatccccaaatcaaagtaacatcccaaatccacatcacatataaagtaacatcctaaatccacatcacaaatcttaaagttacatatacacacaaatcaaatacatcacaaatcctaaaaaattacacacaaatcaaatacatcataggtcatctcagatccatccaataaatcacaaaattatacatctgaatcacaattttttttttaaaaaagaaaacaacgccgttgccgccgcccgccacggccgccgcctgtggcctcgccggccaccagcccgccgccgccgggcgcggccccgccgcccaccggccgctccggcccgccgccgggcatggccccgccggccgccggctgccggatgggaaggggaggatagacaggaaaggggagaggaggaggtggaggaggtggaggggatggaggggaaggggaggatgggcaggagaggaggaggtggaggagaggggaggggatgaggaaggggaggaggtggaggggatggatcaggatgagaaaggatcgatctgatctgaattgtagaaaggggaggagaagggaaagagggggaaagattcgatctgtgtgaaagagaggataagcgatagggattatatactacgcttggaattttagtttcggttggtgttcccaaccgggactaaagacaccaaccggaactaaagtggtgacaccaaccgggactaaagatcctcggccccttgacattagtctgacaggggataaaccgggactaaagatgatttctagtgaccaactgggactaaagatcatataatggctctgggggttttcaaccgggactaaagatcatttttagtctattatggttttgggtcgacccaacaaagatcatttctccaccagtgtaacatccatgatattaattcctgtcgttctatatatgaatatatgatatcaggtctatggaccaaactaattccacacacttgttgattcaactaaagaacggctacaaggccacaacatgacagtgcatacttttacaacttacaagctcgatagtcgacagtgatacagctcatgtagtcatgtgtaacaggtgacagtttattgaccaaaaaattccttggaaagagacccatatatagctgacaggacattttgaagaaaacaaactagacggaagacaatctcttgtcaagaattcacattggtcagtcacttatcgacagaaatatatatactcctacttattatgggaaattaagcaggcgatggaacaagtcaatgatgcaccccacctaaagttcatatatatgcatgcataaagttcagctactcgctctaactgaatggttgacagattatgtacttatagggattaattaaatattacagatttaaaattttcttaaacaaatatttaatcaattctaatatagagagttctttttacaaagaatagtacttcaaagacatggcacagataatccatacaagctgatcttagggtacaatcgttccgacaaccaacaatagctacttgctcactctccatgagcactattcctgaaccgctgaatgatgtttttttttaagttttctatataaaagtttctttaacaaacaaaataaatatattttttaagtttatgcactaatattttcgtgtgctaccaaacatatcggccgaacagccgcaatgaacacaaacttaggccattctcggtaagagttttattctcattaaggagggtgttatgtaagtattttcaatgatgttgcaaggaattattgaagtgagagatgaaatgagtttgtatcttgcaagtattgccttttagacaatgtattgtacgagttattttttaaccatcaattaaatacattgtgtgtcaccctttgaaaacataaaaataccacagtcaactaggaatagctttagggatttgagttctcttacaataccagaaaatatggccggtgtcacaacgacaatgctggtcctgtgcaggggcggattcagaattttaatagagggatgcttatcttcttcttcttcctcatcaagcaccccccctcccccgctcttccctctctccctcttcttccctctcccccctctcattctttcaatgctgatccaatggggtagggcggacttgagtccccatagcacccacgctggatccgtccttggtcccgtgaaaaaatactggcggcaccaatggccgtgactgagacaatcaacattattgttgtgcactgtcctgaatctaatctgagtcaataattcaacacgcctgggcattcaaagggcctctttgagggagtttgtaacagttgcagcttctcccagaattagaaacttcctcaaacagtctagcttttcgttcagattctaaggagctatagttgtataatctagaaaatgaactagaagctagattctcagaagctaaatgataaccatatgcttctcaaaatcttaaactcctccatacagacccaaagtcttagaatccagctgataccacaagtactcctagtaatgatagctgaaaaacccatcagtttttgtttggtcagaaaatgcaagaagcttaagcgcacatatctactagtatgtatacatgtatgtaaggacaggtataaaagcaatcggtactccaagatagtcatgctagaattgaagatcactcccgctattcaagctagatgaatggaaaagaaacgcgaatcgaagtcacaagagagatagatcgagcaaaaaagtcctgcaggcgcatatgcaaagcttgattttgatggatcttggatctgtcaattaaccactccggcgtgtgacctgtggtcctgtctttagatcaaaacacttgcgtatacgtaagaaaccagctaaagcagctagaaaaatgaataatacagtactaagaaacagagaggcacaactgcttatacttgcaataatccacttccaaatttataaatataaattttacccccatgctacgtaacacgtgtaatgtattccctccattctaaaataagctatttctaaaactcaaggtttgtttcataattaaactatttcttcatctaccctctcatctcaactaatcatccattctctattttatttcttcacatatttcttttctcaaccaatcataatctcttcctaattatttttatctaatttcttaatactgtgtattagctccagaaatacttccattctaagaggaccaaacaacacaattatatttatcaatcagctagtcggctggtcaaccaagattctaaaatacaacaataaccgctcagttatcatagtctcatcgtattcttcttcttcttctctaaaaaaaattgtactccctccacatccacacctccacatccacaaaagttacacctatttcacatttaagttttttcaaataagttgttcttatttgtagtctttgtacattcaaaacttaaataaagagataaattaattgtttgattagacccaagaagtcaaatccttaggatctgttcttttctccaacaaaacttagatgaaaataaagattttcgtggcacgcttttcaaactgttaaacggtgtgtttcgtgcgaaaactttctatatgaaagttgctctaaaatgtcagattaatctattttccaaatttgtaataattaaaactcaatcaatcatacgttaataccacctcgttttgcgtaaaaaacttaaacttcatcttcatcttcaacttcacgagaaaagaacaccacctaaatactcattggttgcatgcttgcattcactccttgattttataacatccaagacgatttaatttttcattggtctcgatgataaaagtaataggtgtaacttttatggaagaagggagtagttaagaaatggcatgtagcctagtgaatttcagattggttgtttgcgggattaagttcctaatttaaatggccgtatatatccggttggatatagaggccgggtaataaatacccttcttaaaaaatttttttgtagttatcggttatattgagatgtagaaatctctatgcatgcatgtacgcgatatcacctaattaattagcaacatacatgtgttacctccgtcttcatataactaattaattcacttttaaatttgttccaaaatacatctactcatcccaccaattataatcttttcttattatctaaaataatataatcatttcttatttaatttcttcgtatatcttctcatgtcaactatgtgatgtgattgaactttaacacaaacgagacaacaacctactccctccgtctaaaaaataagacaatccctgagtttacgtgtccaacgtttgaccgtccgtcttattaaattataaaaaaaaattaaaaagacaagtcacgcataaagtattaatcatgttttatcatctaacaacaatgaaagtactaattataaaaaaatttatataagacggacagttaaacgttagacacagaaacccagggtttgtctttttttgggacggagagagtagctagcataacactaaaataatttaagagtaaatttcacaaaactacagatactatgactagactatcacaaaactacagaattaaggagttgtatcacaaaactacacatttagcaccaaatttgtcataaaactacacatttaagatgaaatgttacaaaactacacgtttagtaactaaattatcataaaactacgggtttagaaccaatttaatcatgtttatagctacaccataacaatggtgctagggatttaaactccaaaagttgtagttttgtgataagttcaatattaaatatgtatttttgtgatacttaacctaaaatctacagttttgtgataaatttggtgctaaatgtgtagttttatgatacaactccttaaatctgtagttttgtgataatttcgtcaaaatacctgtagttttgtgaaatttactcataatttaataatataattaatgctaaaattagatggatcaaaatagaaatttctattacaggtgtacaaacagagtcacaaaatatgctaattttcgcatttgcatgtgcgccggccaacgatgcgggattcgactgagacgtgccgatcgatgcatgcatgatcgccactactccacgttgaaactaaacccaagtcaaagtaaacacgtatatttgaagtgcacatagtttcattattagaaaccctcgatttagtcgaattagcgcttagattgaaatgaaaattacgacatacacccattattttggactctttaaatcatccattttggcatgggtgcagtgagcactaattaccgtgcacgcacgggatctaaaaacagtgcgcaggccgtccccgtcacgtctcactgctacatcctggtctatggctgatggccaattcaaccacatgagcgtactttcccggtctcataaaaaataaacatagtcccgttctaactttataaaggcacatatttttcttttttttcgttagcacgtttttcaaactattttataaaaaagatttctatatagaagttgttttaaaatatcagataaatttattttttaagtttgtaataattaaaacttaattaatcatgcgttaatagctttctcgttttaatcttaaaagacgcgaatattagggaatgtcataatatcaaataattagaaggggtgaggtttcgaacccaggtcgtctagtctaccaccttgtgtagctagtcggaagacccttggacatttctccacgcttttaatcttcatccttaaaagattcaagcgggcgcctgatacaaaatacgacaaatcctaagatatattacatcctatactaggtcttctctttatatgatagagcgagtaggcctgtatataagtgtgatcacgcccactcactgacagactcatagacaagaattccactacaacactctaccgatagtaaaaaaaataatctaaatcatcgtttttatttgatcgaatggttcagatctatttatactatcaccctaattagtgataatagaaacgtgaaaaggtattattgtaaaaaaggtgcgaagggacataattgtcatttagcatttagcagtgattaaatatttttttctcctttttttagctttttgataaaatatgagcgatgcgagcgcaatgaatgagcatggatcgatgtagccataaaaaaccctaatcactgcattagtaaattaatatataatttgcccttaataatgaattatttaaattatttttactggtaatataatactatctatcagtagatagcactagctagcgcattactccacacacaatcatctcaggcccagccaggcaaggcagcagcggccatgcatgatccatcgatcgggttcgcaagctatagcaagcagcagctttcatttcctttcctttccccttttccttatcacgcctttctcgctctttggcttttgaggagggagggagtcccggtagacggtagacgcaggcagctcgataatcgacaacaagccagcagcaatagcagtgttgcagtattactcccttcgtcccaaaataattgtaattttatactattcacatttaacgtttgactgttcatcttatttaaaaaaaatttacgattagtatttttattgctattagatgataaaacatggatagtactttatgtttgactaaatatttttaatatttttattttttttaaataagacggacggtcaaacgttgagcacgaataacaactatatttattttaggacggatgtagtacgtacgaggactcatttattaccgtgttttactgatggatgggataacagtactgatggatgggataacagtgacaccccccccccccccccctctctggtgccagctacctgggcagctgcccggtccatggctatggctcacgcctggactgctctgtattccgatgctgcagtgcacaactgcacatcatcgatcggaataagaggtactcctcctcttactgccactctgccagcttgctgtgcaaagcgaaagcgaaaagaaaagatgttctactagtactgcatcgatctgcagtgcgtattcgtttctccgataagagttgatgaaatctcacgtactcgtggcacgcttttcaaactgttaaatggtacgtttcatgtaaaaataaaagttactctaaaatatcatattaatccattttttaagttcataataattaaaactcaattaatcacatgttattactacattattttacatgaaacacttaacctgtatcttaatcttcatcttcacgagattcaaacaccaccccgtacatcggtacatcagtagtactcctacatggaatcattcctaaacgcgctcgctgtagccctagagatagagagaagagagagagagtactcctactttactgtcgtacttatgtgatacagtagccgttaattgaggtgatagttaggctatggcgagcgctccatgctagagcgtggtctcacccctcccgaggcgaatattcgcgccacgcgggtatttgtcataacgacggctctaacaggcaaggaagcgtgttggggagaggcctctccctgtgccgtcaccccgcaccattgaaatcaactcactcccgcgcattgctgccatgaacgaggtcgagaagggcctacccggcggtgcatcggaggattacggcaaggtgctccgccgcgaccgttgttggctatttcgccgccccaaccaccgtttcgggcacctccttcgccgaagtcaccgcacaatcgctcgtatcctcaccgcgccacctcgatctctgcctggatccccaccgttgtccccaccactcagatccttactgcgtcggctctatctctgcctccactgctcgcccccccctcccccgctacggcgatcgagtcaggcaacactgaggggagaggcggcgccacagagggagagaggggagaggcggagaggggtgtggcttttggtggcgaggcgtgcgggcacgtggaggaagaagagcgacctgtgtggcactgtgcgtgaggtaaggaagggattggatgggctgggagagtatgacagtgggccatggactaatacgtaattttttctctacccaaaggactaacatagaaaaatgtttatgggacccacttcaagaatgattgctcaagtcgggtcttagactgcttttgctcacgtgaatggtgggggtggtgcctgcgttgaaattggccttatagggcaggagcaatgcaaagcttcgattccaaaaaaaaaagtgtatatcacatatgatgaaccaatagaaggatactattatcgtaatgcaggcaaccttcaagttgggaatgcgaattgcccaacgcaagtgcgtgccgtgcctctgtgccttttgtcctcgctcacaggctaggaacccgtgtacttagcaccgagcggccttgcaggcgatgacagagaaccacgtggatgaaatctttgacgtggcatatgcatctcgaatcgacgagggcatactacaatcatctcttggcgaaaacgtacaagaaaaacgaagcagatcagcgcccagaagagactcccaaaaacgaaagtgacgtgtgctagctactgatggacatgatgatcaaacgagtgagaccgatgccgataataatcttgcggacaaaattttgacccacgccgcgcgcaccggccgccgtcacatacccgtgctatctacaggaccgatgtgctaatcctatctatcatagtgttctagctagttctaccgtctctgccccaccaagaaaatgtatgagtggcgcaggtaggggggtgccaaagtgccaacaccccctgtccaaacactaccaccactacacccccatacttttactctatattaagttagctaagatagttatttatctagtttattttgggtagcttgaaagtattatcagtttagttagttagcaagtctaaaaatattagcaagaaacatgattaaaaaattagtttgtgatttctcatctttttcaatgtaaaatagatgatacttatttatgagattatttaatactccctccgttttcaaaatgtttgacactgttgactttttagtatgtgtttgaccattcgtattattcaaaaaattaaagtaattatttattcttttcatatcatttaatttattgttaaatatactttcatatacatatatagttttacatacttcacaaattttttaaataagacgaatggtcaaacatttgctaaaaagtcaacggtgtcaaacattttaaaacggatggagtagtttacattaaaagaacttagcaataaatattagttttaaacttccaatgatattattaaagagctaaaattcaagtttttcttaaaggactagtttacgcattgcttgttattagcggtgactatttgacctactttactattaatattagttattcagtcttatgatttatcttcacccctacatcccgtaatctcaaatcctggattcacccctgctgatgtttgcttgctcagctgcacgcctgcaccacaggacaaaggctgatccatgttgtcctttgacataaatatgcttgcatgcgtacgattcacttcgatcaccattcgtgcctgcaaatctgccatggcaaacagaactaaaaagaaagaaaacgtactccctccgtcctaaaatatactccctccgtctcataatataaggaattttgagtttttcttataacgtttgaccactcgaattattcaaaaatttttgaaattattatttattttatttgtgacttactttattgtctacagtactttaagcacaacttttcgttttttatatttgcaaaaaaaataaataagacgagtggtcaaacgttacaatcaaaaactcaaaatcccttatattgtgggacggagggagtaagtatttttggacttcgatacggtcttcgagatgctactttgatcaacgatatctatataaaaataagatgttttaaataaaaaaaagttgcatattgtgatagtttgtttaatgataaatctagtaacatcaattttacataattgatctttttatatttttgctattaatagccaaagttataaatatttgacttggcactagggttgtcaaaaaagctcgaggctcacgagctacttgagctcgactcgtcctaggcttaattcgagctcggctcgagctccaaacgagccgagcccgagcctgtcccaaagctcgtgagctttgtcgagccgagctcgagcttctaacgagcctagtaatatatgattttttattgctatttaataaattggtagatcaaatatgttatttatatgccttgtattggcataatatatttgttttattttttttcctcttctactaatatgataaaccataaattaattatttttaaaaatttatcatttgaaatatacattgttctaattaaaaatcgagcacggtagtcgagctcgagcttgatcgagctcgaaccgagcctgtatgaaagcttaaatattttataagctcggctcgagcttatatcgagctcgagcctaggcaggtgagctcgctcgagctcggcttgttgacaaccctacttggcactatgctaaaaatgcttatgttttgggacagaggaagtagctagtagatcgatgccgccgttgctcatctgggaatgctacttcctccattctaaaaaaactcatctttatagtgacctagcactacaaatctagacatatctatgtccagatttatactactagattatgtcctagcactataaatctaaacaaatctctgtccagatttatagtactactagaatatgtcaacatctagtaatatattaagtttttgggacaaagggaataatagcttgcggtggccaccaaatcaagatccccacggccatgcacaatactctcttcatctcaaaataaatttatgttcaattaattattagtatatcatgatttataaaaatagaagacaaaatgtatttaacgcagataaagagataaataactatattatgattagataagctgaggtattataatctctttgattttatattgctatgtgtgggatatatgaaaatatcatagtactccctccgtattttaatgtatgacgccattaattttttaacaaacgtttgacctttcgtcttattaaaaaattatgtaattataatttattttattgtgaccttgatttatcatcaaatgttctttaagcatgacataagtatttttatatttgcataaaaaatttaaataagacgagtgatcaaacgttggttaaaaaatcaacggcgtcatacattaaaagcgtcatatattaaaataaaatacggaggaagtattataaaattagagggagtatataacaccagatgcgtacattaattcacatctggactacgcagtgggcagtggcgagtggcgacgtcgtttgccccggccggctcggggccctagccaagaaaatcaacgcgagacggccgtggcccgtgggagtcgtgatttgatcgacgcgtttatcacaagccttttatcgctttgcgcacccacaggagcagcacacaactgtagaaaatatattgtgcaccggccgtttaatttctttctgcgaagtaatccgaagaaagtggaccagtcaccggacgcgtacatagatgaactagtgcaaaactatatgttatggaaaacggctgtaccgaccgactaatcggccgtatatacgatcacggtagtaaaaccgttccgttaacgtgatacaatgtacattttatagttcacaaacgttaaaactccgcttttagcgattagttagtcgtttcacgtttaatcacctgaataatcgtatgtatgttgaatttgatgatgaattagggtagttttctttacttaatttagaattgtttttttttttacatatatttctatgttttacttatttaatactacctccatattttaatagatgacgtcgttgactttttctcgcatgtttgaccattcgtcttatttaaaaaatttatgcaaatgtataagatataaatcacacttaaagtactatgagtgctaaaacaactcataataaaataaattataattatgtaaaatttttgaataagacgaatggtcaaacatgtgagaaaaagtcaacggcgtcatctattaaaaaacggagggagtataaccaattctaccaccatgtgatatataaatccggtgttagaagagttaatgttttacttatctgttaattaaaaaacaatatgaagatatttactctgttttataatgtaagactttctagtattgtctacattcatatggatgttaatgaatctagacacatggatatttagattcattcacatctttataaatgtgggcaatgatagaaagtcttacattgtgaaacggatgtagtatttgatttatatagttgtacacgtctaaatctttaaaaaaagtatataatattgtaaaatttgtatattattcacgaacgataaattttcattaatcggttaacggtacccttttcaacccacaaccgtattccgtcttcctcagtactaaactataccgagtagtcctgctcgttcggtctgcacaatgtgcacatcgatctctctgtgcatcaacagaggcgtagctaattaattaaggccacgacatgtatctctctctgcggtcaactgtgctatactgctcactctcaccgccgacgatcacgacggggccatcaccatatattgcattgtcgccagttaacgtttgtcacatgaaacgcaacgagcgattaccatatgagagctgcgttagagcatgcacagtagttactagttagtccttgcttatagattggtttttgccttggcagtagtccttgcttttcggaagatgcaatctctgctgcggcgtgtccatcttgccggaagccatggctccgccgcgaaactgttgagctctgcagcctctgaaatcgcgcagtcgggcgctaagagtaagtataatagtgagctatataagcttactataaatttaggtgaagaaaagaggtagtgaaaaattaagggtgttggctcttagagcaggtacaatagcacactattaaccagctataaacatattttaatgagattgaagatgagagagaagagcagcgggctacagatctgtagccagctgcagcatagactccaaaacacagtgtgtgtataacaaataggaccatatattaatagtatagtaagcaactattgtatgaattagctattagattggctataactgaattggagttagtagtaggttatactattgaacttgctcttatataagagctaacttatcacaagtttcaagacaaatgtattaaatgtataagtgagagatagaggtaggagaaaaaaagtataatcaatcttatagataatatattatatacgttggtttcaagataggttaatagtagaaagtgagcttgttgctctaacctgcgctgtccatcgaacacctgaggccctgctgcagctggattcgtccattcggggtgcgtggtttgcatccgggatatcagttgtgtttgtttcctttccgctgtctgtgatcctgctaatttttggtcatgcctgtcgcttcggtttcttgatgcgtacagaatccaatcatttccggtgacagcgttcatcccggtgggttctgcgtgaataccatgtcaatgaggggtctatcgacagtggggagtgctgaggtttctgcagaccatcctccgtgcattaagttcagagcaggtataatagtaggctataagccaactataaacatattttaagaaaataaaagaggagagagaagtgcagcgagctacagatttatagccagctgcagcacagactctaagatgcatgttatatgataggtgggaccagatattaattatgtagtatatgtttataggtaactattgtatgaattggccattaagttgactacagatgaattggagccaacagttggctatactattaaacttgctctcaagaggcctgacaagacggctatgcacgctagagcaagtataatagagagctgtaactgtaagagcaggtacaatagcagactattagccagctataaacatattttaatgagataaaagatgagatagaagagcagcgggctacagatctgtagccagctttagcacgaactctaagacgcggtgtgtatgacagatgggaccatatattaatagtatagtaagcaactattgtatgaattggctattagattgactatatatgaattggagctagtagtgggctatactattaaacttgctctaagatggctaaatgctgaggtggatgagagaggagaggaaagagatgagaaacaggctgtaagtttacaaccggcttaggcacaaaaatcaataaaatctgtgagacagacagtagacttatagtgaagagctaatcactatatgagtgagtaaaaaaatagactataaaaatttatatagtaaataattggctgtattattagccttgctcttacgaatgtaagcctagtattgtgcaaatgacatatccaagaaacttacagttgtgtcaaaatgagcacttaaaagaagcaggacatatttgttattttgtgtttcagatcttgaacatggaggcagctgacaaggtacttggggaaagagagattcctgatgtgcagcctggatgtattctccaaatgagactggtaaagcatctgcatcctcagtttactggtattttgtctgctcggtcatttctgccgttctgattatgtgtgtaaaaaacagcaagttcctgagaagaagcggcgcgagtctacgttgaaaggcattgtcatagcaagacgcaatgctgggatcaatacaactttcagactgcgtagattagtagctggtgttggagtcgagtctgtctttccactgttaagtgacaccaaatatttgcttcccttttgccgcctcatctttttttttcttaaaagaaatgcatatagagatatcgaatcacctcttggtctcatgagtgactaattgttcattcaaatgtgagaactgtgcatcatacagtacttaatactttaaggtttgagcaggctattctcactatttttttgcttggtagacaggattgttttctttgattgtgcgtaaacatactttcggttccatatggctacaagtgaacatagaactataggcgtgttattttgcattagaagtgtagttatctgcttgcaaatttagaaatgctcattcaagtttggtgtttttgtttcttgggtatccttagccttcttgatatccctaataggctgatgataacagtggcatgctagcactaccttcgttgtttgcattctgtaaatccaagtataactttcataatcatatattgataaataccttgttaacaaattcctaagaaagtgaatgccgagatttgatatcgatagtacttgatagaacagatgtgcaataaactcctgtgtgtgtttgagctctattgcacatggagcttgtagaatgtagttccataaatatgcacgttcagctcggacgaaactgcaattttcaccactagaaacacatgttccttcaccactgtggtgttgtgggtatatttctagaatggaagtaatgcaataggatattttcatatatatttacttactatttcttgttctctcttccccttgttctgtagttcatctaaatttttcatacaaaattatcataagttgctggagtcaaatatgaaagatatctttacacatgattcattttgttttgactttcagtctttcttgatgcaacctttcttttgtgctcagttactctccaaacatcaaagaaatcaaggtcttggacaggaagaaagtcaggagagcaaagttgtattacctgcgggacaggatgaatgcacttaagaaatgagactacttctgcgcactaccttcgttgtttgcattctgtaaatccaagtataactttcttaatcatatattgataaataccttgttaacaaattcctaagaaagtgaatgccgagatttgatatcgatagtacttgatagaacagatgtgcaataaactcctgtgtgtgtttgagctctattgcacatggagcttgtagaatgtagttccataaatatgcacgttcagctcggacgaaactgcaattttcaccactagaaacacatgttccttcaccactgtggtgttgtgggtatatttctagaatagaagtaatgcaataggatgttttcatatatatttacttactatttcttgttctctcttccccttgttctgtagttcatctaaatttttcatacaaaattatcataagttgctggagtcaaatatgaaagatatctttacacatgattcattttgttttgactttcagtctttcttgatgcaacctttcttttgtgctcagttactctccaaacatcaaagaaatcaaagtcttggacaggaagaaagtcaggagagcaaagttgtattacctgcgggacaggatgaatgcacttaagaaatgagactacttctgcgccccccccccccccccccctcttttagttgatctgtaaggtttttggtggcataaatctcagtgcaagacagacattttgttagttccagctcctaaatttctggtacttcagctcctaaaggctactgtttgtatttctgatacttgctcctttcaagtaacaggcagtgcagctctttgttttttttttggcccagcatttcaacaaccctaaatttcaagatatgtcggtacagtttgtcagagctaattatagaggtagtgtatgcatgtatgtaattaaagggatgtgtttcgaaagaaaaaaaaagtcgctgctggtctttgtataatagcacttgcttctttctcggttccatcttaatcatttgccttgcattgccactcggtctcacatccaaagctctgcctagaagacccagcgggcaggcgccaaccacgccactaacaaatcctagctcaccagtagagttaatatatacacttaacttgatacgtagtgactgtgacacaagtgtttctttaagctaatagatttattttgctcacattataatagatatacactttacatgaacttcatgacgtactgtggcaacacataatacttaccacaacttagtttttcaaatctcctagtagcattgttgcacccgctccaaaaattatggggctatttaggtagctcccaaatattaccatgccaaatattaggcatgacacaatttggtagtatagtttttggttggttgtcacatctgtgtcatgcctcattttactaatctttgggcctacgcatcgtagacttaaatttttataaaatttagccacgcttatggtcaacaaattgttagtatcatttggtgtagcatagcatacttgtggcaaagtgagatgtggcgaacttagccatcaaccaaacaacccctatgagggggaatcagctccacgcgccttcggtcgtccacacacgggtgaccaggggcaaaccctagcccctggccgccgccaccctcccctcctctcaccgcctcgccgccaccgaaaaccacgtaggaactaggatgacggcagcggggacaaaaaccccggtggcgagctgtctccgatgcgaggaagtggcacggcgtgcgggggaggcctcgcggcggcgcggcgcgtggctgcggatccggcaccgccaccgtcaccggatccggcccttccgttgctggatccggcccgtcgtcatcggatctggctggtaagctgatgacggcgtgggcaacggcggtgggtggcgcgaggacgatggtgtttggcaggaaagacaacggcatatggcgtgggagacgcgggcgacggcgcggctggcaggcgggacgcaggtggcagcggctgacgacaccggccgactgggcgccgccggcgtgcttggacggcgtcgagcgaagagccagggcggccgtgctacgccggcgagcttggtggtggcagcgttggtcgagaagcttgggcggccgtgcggcgttgacgcggtgcccgcggggacgctttgtgctgttatatgtggtggaggttgttcgttggttgcggccgtcggtgaggtcgtgcccatggggagctccggggtgcttggtcgccggaggtcggtgagtcgaggccaatgcggcattcttgcgatagtcgtgtctgcggattggttaggtgtgtaggagcacagggaaccatacgcgaaagccttgccatgccttctggctctggcaacgccttcggcgccgtttccattctcggaggcattgttaagacgtgttccctcttcttccatcattgtgctccaggtgaaagtcttgccccggttaatgggcaagcggcagcggcgattcacatctcgtccctattgggggtgccgctttggagaaccttttcatgcacatgtctagttatgattttgacgttagctccggggcttcctacttccacaccaacactcaacaaggcgaaaatgttcagcgagaccttctccttgttggatccgcttcttgctttgtggcaggtggccaatatccttgtttgatttttgctaggtggagtcgaagctgctttgttgttggggtgagacgaagctcggcaatgataacatgttgcagtctctttctaagtgtacatgctggtgccagcaataggcaggaagaggtggtacggtggctttggttgatgtccgccatgagaagttggagctgcttggtcgtttgtgatgagctcggtaacaaggacacaagtatgtggtgaagtcggagctgctttgttttgacaagctttgcaacgatgacatgctttcattgtgaatgtcggagctgctgccttctgtgcaagcttggcaacggtgactcaccacctggccctgcgcgggctagccacaggtttccctcctcccacgccatcggtgccactagatgtgttgcgctcttcacctgtagcggcggccgggccatggccctcatgggtgcctgtgcgaggagaaaagagaaaaggggcaacaactgcctgatcgtgtgcatgggctgaagcctacgtgccgagccaaactattgggccagtccaaagtgcaaattatgaatacatggtgttaagcctggacggagctagaaaattggctcatcagtatcgtaatgcattattaatgttacttgatttcaagtgtcatcttcatagcctatacaatatagtcatggatttcattccacaaatatattatagcttcgtccttggtgttaagcacaaacaatgggtcgggcatgttccgttataaaactttagttaaaaaaaatcatttcagtgtgaaatttactccaataacaaatcccagctaccacatcacgtcaggtactagtgctatacttggcgttatatcatgggaccagcgaatactcgtggcgtgtcgcgcgttgatgccccgcggtcacgagccgtttcaaaaatcgctcggtttttccgggcaggacttatgaatgcgtccatgggattatcaattatacttactcccaattagtacgggtggtttaattgtttcggtttttttttctttgcaagtactcgatcctatacggattaataatcctgaagaagacgacgaaacgtacggcgtggtgggcagctgtgtggcggtggccgtacacgtggaggatcgatcaaagctgctaagggatcgatcggatcgtgtacgtgcgtacggcgcttcactgctcgtatgatcgaaaatcgtatatctcgcgtgaattgtcaccaaggcgcatgactttttttagaaaagggaagcactgccactaataacgctgtagtagtactctcgtactatcagaaaacgcttgcacatgaaagaaggaaaaggtgagggggttaattagctttaattcgtgggattattgatacatcttctgcacccagtattgaattatcatcaacagttcacccacaaaacggaaacgccagcgtcaccaaacacaacttgcttaagccactcttcatttgcttacaagcgaaaacagaaagaaacggggaaaaagactctgaacagttgagtaaaacacgagcctttacctcacgataaatttgacaatataacatctaatatgcgcacatttgcgtatatattatccaattcgtatgacttctaaaatacaataatgcgactatgattttttaacatgccactttctccttgcttttcttttttatttctcctcctcacttatatgtactcttttgcccctaggcccacacgacaaggaaaagaaagagcgaggggattggaagaaatgggagtcacggcttccaacgagcgctgccgcaaaccaggccctccatcatagtgcatgtggcagcatcccaacgctgctccaccaccgctagcccgcctccttggcctgtcgccaccgatgtcatgatccccttatctctggcgccgacaccactatgcttcaacatcagggacacaccttgccgccgcccctgccgctatgatgcccctgttatcattgaggctttactgaagggagattattgtattatcttatccctccctccctctacggcttcacctttgttctcatgttatgtgagcctatgggcaaaatagtccgtgaacacgagaaggaataaaaagagaaaatggtatgaaataaaaaaattatggctccagtgctatatattagaagccatgattagatgataaatcagcaaagacgcgtgtattagtagatactccatattgtcaaatttcacgttatcttgggcgatagagctggcccagtgctgcagtctttgcgttgcccccgaaccgaatcccacgtcgcctcgccatcggtgcggcatcgaaaagcaaagcaggggcgaaatgctcgaaatgttgtgcatgctccgacgaatatggtaagggcacccgcaatggttatctataggctctctataagagatccatatcagtatattttcctacttggaagatattaaatgaagagagagcaaagctatctactaatctggagatagtctatagagaaaaacgaggcaatgcattagagagctatagatacacatgtagacatactattgaggtggtttactattaatctagtctattgctgagttatacatgttttatagagagcactttactttaccattgcgggtgctctaaacgataaaattattaaagcgggcggggaaaaggaggagaaagaaagggaagaggagagaaaaggaagctagggtgggcatcatccatcaccgggcaccggcacccatcaatccgccaccccacgcatccgttgcttgctcgcccagtcaaggccacacccgcctcctctcatctttctcgttctagtttagtcccacctcgtcaagacgaacaggctttgtcccccttttattgccacccttcccccaccccgcaccaacgtgtctttaccaccgccccttcccatatataacccccgcgctctgctgcctcttctccatcgcgcggtgtttggtggttttgcggtgtttgtgttgatgatggccgtgcaggcgcagtacgtcgcccacgcctcccgctcctcctcctccgcggcgtacgccatcaggtccgtgtcaccccgcgccgcgccgcgcgcgtgcatgcatgcgcggccccgcctcccttcccgcgcgcgcgctctaggcactcatgcgcctcgcgctcctcctccttcctcttccgctgccgaccacctatttatcctcgcgcgagtggctaacaattttcttcgcaggccggctctggagaacgcggcgccgagcagcggcgcatcggcgttgttcctggacgaggccgtctcagcggcgctgctacagcagcagcttgttgttgctgctgcggcggtgggcggcggcggcaacaacaacaacacggcggtgttcagtgacctgcgaagcgagcttacttgtagccagcgccgctttgacgacttcggcggcggcttcgtgccgcggaagcgcgcgcgggttggcggcgagggagaggcggcggcgggtctgttgatgagcagcagcgtcatggagggcggcgggcaccgcgcgctgttgccgccgccaccgccgcaggtgacgccgcaggcgttcggggacgtgcacaagagtagcagcagggtcgtcggctccggcgcggcgtccaccagcggccgccctgtctgcggtggtggcctcctgttgtcgcatctctaccgccagagcgtcgaggtcgacgcgctcgtccgcttcgaggtgcgcgccaccgatcgcgcatttatttatcgccatgggcgctggagctccgtgtcgttttgtctgctctcctctctcgaatgggcgtttgactcgatctgcacctacctacagaatgagaggctgcgcgccgggctggaggaggcgcggcgccggcacctgcgggcggtggtgtcggcggtggatcgcgccgccgcgcggcggctgcacgccgcggaggccgagctggagcgcgccctggggcggaacgcggagctcgacgagaggctccgccagatgggcgcggaggggcaggcgtggctgggcatcgccaagagccacgaggccgccgccgcgggcctccgcgccacgctcgaccagctcctccagtcgccctgcgccgccgccgccgccgccgccgagggcgagggcgatgccgaggacgcgcagtcgtgctgcttcgtgcaggcgcccgacggaggcgcagccgaggtgtccggcggcgggaacgggaggagggcgtgcagggcctgcggcgaggcggacgcgtgcgtgctgctgctgccgtgccggcacctctgcctgtgccgcggctgcgaggccgccgccgacgcgtgccccgtctgcgcggccaccaagaacgcctcgctccacgtcctcctcccctgaccggactccggcaaggcagcgcgacgtgtgcccattgctcgaccggtcgtgcattccaaggtcgtgtcaagactcaagttaaaaaaaaaaaagcttccttcctcttttttttttaatttctcttttgtttagaactcaccccgatctgtatttttcttttacgggttgtcccccgaagaggaccaatttgggttttttttcacctttttatattttttagcatattagattagtgaagttgttgaaacggtaaatagaatctactagattaattgtcttaagacagaccagtaatacaagctgttcatacttactcccatatctcatcgttttctttcttcttgtccgtttggaaaatactccctccgttaactttttaacacatgtttgaccgtttgtcttattcaaaaaattttgtgaaatatataaaactatatgtgtgcatgaaagtatatttaataataaatcaaatgatatgaaaagaataaataattacttaaattttttgaataagacgaatgatcaaacatgtattaaaaagtcaacggtgtcaaatattttgaaacggagggagtatttgtctctgtgcgtcattgcttggattcagtttttgctgatgcgctgaacacctccataaaccgacgcaccggacgcacgatgcttacgtcgcaaagcatggaaaggaaaaaaaacatgcactttcacttttgttctgttattatcaatcacgtcgagactacagcaacacgctttgatttttctggaaccagcattacctacaatcaagctaacacctatctaattatttttttcctcagctgcctgtatatatatgaatatatctcaagggatgactcattagtcattacacggtccttttcgtttagaaaagtgaacagaatgagtttcgacattttctgctatatgcatgcagggaagaccatcagtccatcacttcttcggtttcagactttcagacttcataggcagattagagcagcagttgagcttagaaggcgtatcagaaaagatagctggaactagcagtagtactcacagttttaaatcacagtaagccaatactccctccgtcacaagatagtgcagccatgagttttcgtgtccaactttaatcattcgtcttatttaattttttttagaaaaactaaaaaaaattagttacggataaagtactatacatgttttataatctaataacaataaaaatactaatcataaaaaaatttaaaataagacggacgaccaaaattagacacggaaacttattactgcacttattttgggacggaggtagtcctacgaatgcatagttaacaccgactgtggaaaagttattgcacgattttgatagctttggtatacagtacagagcaggtacaagctacagagaaatttggcccgcgtttccaattttctgcgcgaacccatccaaatttacaggacaaattatgcaatcaattcacgtcctcttatgtttatacaagagtggagagtcaagagagtcggtcctctagtccgtatgcagtttgcagtagaagggctggtgtcaagcgacaccaacgactttcggtaaaacctatagcgaaactgtttatccatattataacttcataatcgaagcataattagcatactatgacaccgataaacacgttatgacacatgaacgaatcgatcttctggatctgctactgctgggagctctttgtccatcttctcccccatcttctctcaccagcttaaaattttgagttaaataggttggtacatatgcaccgtcagtagggaggtgataatttcataaattttgacatgattatgtactatggctcttccattgtgctccctcacctcacccttttgcttgatccgagttatataaactcttcatactttgagaccttgtcaagtgtgacatgtgaaattaagtgatgatgatattctaggtacagtaccatatgtgctccaagaggtgtatgaatgctagctagctagcgcgctaatcagagcgaccttgtagtagtatagagtatctttcttcctctgaatttctggagtacaatctgtgcatgcgtccatgtttttgtgtatgttgttcacgcaccatgtggcacattcatctaacctagctatacttgtagatctagtacaatattaagccaacatgtaggcatgcatgtagcggagacaaaaatttcattgtatatgatgggtgaaatcttgcgctgttgacatgctgtcggcttcccgcccgttgtcagggtgcaactactagctgcccctgttactactcttgtttttttttctttcaccgtgcttgaaaggagtagctagcttacagttgattgcatggtttaccttcctactttggaaactaaaaactgctccaaagcagttttaccaaaaactggtagaaaatacagtgaagaccaacaactttcgatcgatgaactatgaaaactatctaaaatcgatgtgttttccacaaaccgagatcgtctgcgatttgtgaaaaatcgatcggttttgttaacccgggttgattgtcatgtacaaaggtgcaaagaaagagcacttttatagtgattgatctagtaatagtatttctagtgcaaggaaagaagaaagataaagtgtggaataccttatatttaggagataaatcttaaatgtttgaatcccttagatttggagacggagggagtaaaaatcaaattattttgggataaactttaaggtccctttgaaatggaggattggcaaaggatttttggaggatttagtttctttaggttttttttgtcctatagacatgtttaactcatattttctttccacaggattgtattcctataaccaatttcaagaaaaataagtaagggattatacctattggaaactatattttggtctatttttttccctgtgatgcaattaaagatagccaacgctaaaataaattgtgttaaaaatattttaaaatcaactttaaaatcaattcacaaatttaaattttaggtttttgctttaatttattagatcaaccgatgtgtcttttaacttgtttttagacggacggagcaaggagtaccattggtagtccctagtccctctagatgtacaatgttggtggtgagagatctgccggtaccagcggttagattaaagtggcagaagtaccttcaagtgcggagtaaaacagaccgatgatgcatgcacgtaaaggttggtcctgtggcctacggaagagaggagccgccgggtacaaaagcagcaaagccccagaattgcacaaaacgagaaaaagctgtgcgcacttttgcctgcaaaccaaaaaggcttcaaacctcctcacacctctctcctcctctttgatgaggtttccgttttactactagtagttgggagggactagtcgagtagagaaggtacaataacaaactaaaaactaaatataaacacatatcaaggagataaatataaagagaggatagtagcggactatagatttgcaaccagttacagcataaactacaaaacataatatatgtatgatatgtaattattagtgtagaatatatttataggtaactatggtatgaattagctattaaattatctatagatgatttgtaactattagtttggccatattatttgctcgtagtggtacgtattgggggcgtgggtcccacatcatcgagatcttaacgcgcaattatgaacgtactagccggagtcgaagacggtcaagctaggccatctacagtacagtagctaagcccatttctcgctgaaatttggcaagcatttcatagagtttttttcccattagaattcgaatggaaatatggaatgatcctgtgtcctcgtggagaccagctggggattctctagttcccgcgttttaaaccttcgccatcttcggattaattcttgtaatacccggtcaatcgtactactaactgatactaaaccaattggacatattctttgtcgtatatgctaaataccaaattggcttaccacttggccaaaactacttgccatgctacatttacatcgtcacctaattaaactgaaaaaaggaagaaagagtagtcgccctgcatatgccgtaggaaagtgaaaagtgcggtcttgatcaatggatgcacgcgtccaccgatccaaaatggaccgaataattatctcgatggaatggaattgcaccgagaatgaactatacaagtcattcttgttgcaccatgattgccaatttgaagggaccccaaaaaaaaaactactccctccgtcccacaatataagggattttgattttttattacaacatttgaccactcgtcttattcaaattttttttgcaaatataaaaaacgaaaagttgtgcttaaagtacggtagataataaagtaagtcacaaataaaataaataataattttaaaaatttttgaataagacgagtagtcaaacattgcaagtaaaaactcaaaatctcttatattatgggatggagggagtactaagatagtagagaaaagaatatgatctctctggggccttgggggtaggaatcactgccaaaagaaaaaaaaaagaaaggaaaggagaaatgggtggccaacatgacaatgcaatgcaattaatttgttttgtgacctagctagatttgttcatcaattccattggcgtgcaagccaagatgtgataggatgcaaatgtatcgtgcatgtacatgtgtgccaaggggaattgaagaagttgcaagaaagcaacagcctctttctttggatgcaacaacaagctagagaagaaaaaaaaagtgcctactactcataaaactgatgagcaattgctgtgctagtgcccctacatgaggtggcatattcccatctgaaagcatgggtgttcgtgatctttaattaggtctccaaccaatgcaagaagacctggagagcaggcaaagggaaaaataaaagggcactttttgtggaaccccccatgaccatgagtgagtttgagtagtacaacaccctagctgccttaactaaaacaaacaaatcttgatttggtgaccctgggaaaggtgcaagggagggagaaaaaagaatgtgaaagtgagatgaaggagatctcatcttttccaaggttgtgcatgcatgacccacttgaacatgtcttggacttgtgatcatgagtgcaaaagatgccacaaggacatgagcaccttcatcttttcattcaccccatagctttgttggagctcactatatgtttttttttccttctcccctctcttaaatcttttcttttctcactttgggaatctacacatccatctatccatctatctctctttttacccacagtccatggagctatctgctagtatatgacatgatgatgcttcacctcatcacacatagtactacctttgcttgtcatggtggtgactagatccattttggaattgaaatatttgcctcttttccttttctccatagatgcatgtatgcactggtggtggtgttgtcaaggtccaactgcccaagctctcccccagaaataacaaaatgcatgtgcaatataagctaatgagggatcaaatctatcatcaaaaggtaaactaagcatggttggaatggattggatggatggctagctcactcatcacaggccactactaccagtacagcagcttggctggcctaacttgctcattcattcaatcctgctgctgctgctgctgctggctggccaccttccaaaaggtggtagatagtgtggcgccaaagggaaagggaaaggagtcttgtgcttgtgcaagtgcaacacccagcatgcatatgcatgttcaatgtcgtcattggatggtgtgtgtgtgtgagagagaagaagcagtcgcatctgctgagctctcttgatctgctcgatgcatgatcgatcaccaccctgccaatagtccaatactgctggtgttggctgctactgtgtcctcttccttcgtcgtcgtcgtctctgcctcgtgtggcgccaatgcgtgatgtgtcagcaactttcctcttctttttgtcacctttttttttactcacttctgtagctaactgtacaagatatatagcgtggttttttttaaaaaaaaatgagtgagagtcgtagcaagtttcgttctgaaattttcgttgtgtatgtaggtcggtatcaaatcatgctccaattttgtagctgaaagtgtaagagagacgccgacgtccaactaatccgcttattatccgcaggctagctagcgctttcgtggctgatcacaataaccactccccatccatcacagaccgaccgattcagtatactctacttcctctgtttcacaatgtaagactttctagcattgctcatattcatttagatgttaatgaatctatacatatatatgtatttggattcattaacatctatatgtatgtggaaaatgctagaaagtcttacattgtgaaacggagggagtaattagttgccacaagtaagtcatgcatacagtagttcataatcttcgtcattggcagttgaatctagataatctgtacaaataaccctgtgttgtttttttagaccttagatcattcattgacccggtttcgctagaaagcgcaaactaaagatcattccattgagaatccttcaattcctttctggcacaaaacgaagcaacggattaattaatgtataataaattaaatattagcttaaaaaccttttaaaaaataattaatatgacttttaaagcatcatttatatagagttattttaaaagaaaacatattatttaacagtttgggaagcatgcgtgaaaaacaagagagcagaagttaaaaaaaataagaaaaagaacacacctttaaaaggaaagtaaagagttaaaaagtgaattatgggatttccagctttcaatctacgcgccaaaaacataagtattagagcaagttctatagtatagccaactactaactccaaattatttatagtcaatttaatagccaattcgtgcgatagttacctggaaacatagactacactgttaatatcctacctattatacacacattgcgtcttagggtctgtgctatagcttcctacaaatatatatcccgttgcttttctcactctttttttatcttcttgatatatgtttaaaccgacttatagtttgctattgtacctgctgttagcagatgatgtggcagcaagcagcaaaggtgccgacgtgcgcaggcgtcggtgaggcagtaggatagtgaagtcacggcacctgtagtgatggagattattgtaggtcgttttacggtcgttctgacggaaaacgttaatatgtgaaataatcacgtattaatgctattgctacaggatgtggttggggttgagggttagcatggaattaccaacaaaacgttctcatcacacgatcagtaccgttcggcagtgttaccgtcaactacccaaaaaaaggagcccggtgtgcgtgtccctggtgtcacctgaactgaatctgctgggccgtccaaccattattcgttgaaaaaaagttcacatcatgtcctctcactatggtcgagttttattcacgtccctcgttccctcaaccacgatccagatacatagcgttctctaagcatgtgtttagtttgggataaagtaagttggttggactcatccttgtttctatgatgtgatcatcctgtctatctgtttggcatgagtgatgtgatggtctttttaggtgctaaaccacatatcgatgagacaaaaaagtgggttggattgatccggcaattttttagggatcagttcaactcgaatctcaggagaataatccctttcatggatcatcccatcccacctaccctcaaaccaaatacaaagtggggttcgaaacaacccaaccccgtcccttgaaccaaacacatactaacactgtgtaaattgagtgtttcaacggtctggaatagtgacttgagccaccagttgtgccgcctgcaaacatctagccttgacaccaaaaacagttgggcgaccgaaccgggggcaagtcgagtgaaaaggagtctcacggtttgttctaagattgtttgcgcgatctttttttgttcttcccggatgaagagaaaatgagagaagaatgtaggaacatcctgcgcggaagcggaacagaagaaatgaaagatgatcaatcattagtagctagaaaagccatcggcaacgttatcctcaggttgaacttcacagtaattgggtttgtttggtttgtaagattttttaaaacgtaggaatagcatgagaacacatgtgcagacctacgaattgaaaaacatagaaaacttacctatggttgtgtagaaaacaatttaaaggattgaaaatatttggttggagtggattatttttttccctttaaaagtggagggacaggaacttttcctttgatgcattcctttgaaacgaatgacagtatagtgcccattccaaagcattgcatattcttgtacttttcctttacaattccttcgaaactttacaattcctttgaaacgaataagccctaaggtctactccctccgtcccaaaaaaaggcaaacagtaggtttccgtgccaatgtttgattgtccgtcttatatgaaaattttttataattagtatttttattgttgttaaatgataaagcatgattaatactttatgcgtggcttatccttttaatttttttcataattttttttaaataagacagacggtcaaacgttggacacggaaactagggtttgtctttttttggacggagggagtaggttgtccagtgtccacccaaataatcacattgaaacaacagccacagcccacaggccatccaattatgcaattagaacatagaacatggtgccatggtggtatgaaaagtcactggaaataaaagccattcacatcttctggctgctgcacaagtagttagcttcgagtttgagaatgaaagggacactggggtaaaagggagtggaggaaggatgcagaatctgtaaaatgaatgaacacgtacagcacctttctacgacagaatccagtagacttgtagccaacccttgcatagaatcatattattgaatctccatcacgcaacgtggtaatctataagatgtcaaaaatgctcttactcttattattacagtatcaagtgtcttgtgatgtgtgcttgaaatctccaagcgcaggaaggagcaaagcaaaatcacaaaatagatgcaagctgatacttgcttgaacctcatttcaaccaaaaacaatcacgcgcacatgcaaagtagaaaagaagtcaattctcaatcccttcttgaacaaacaaatactacatagtggaaagtggaaactttataatggtgcacacgcacacttgcttgattgttgatgctacacaccaaccagatgatattatgcttcagcaatcaacaaattctacagttggtgaaaaatgatatgcaatccaaatacaaataataggctcccaaaaggatatcctatgggggaaacattttgtcactaagtgacttcacacacatctcagttgttttccaacttgtccaatggaagatgtgcaactatcatattcacaaaagaaagaatacaactaagtagaaacacaccactagaagagaactaaaacaaagccaaagatgatacttaataaagatgcacccataagcaccaaggccttattgttgtggcactattcacagaagacacaaggtttcattttattttatgttttgaaggataactcagggcatctattcatttgctgcagctacaactgttacagaaagccagaaaaaggccgattctatttgaccacatggcatcaataactgttacaagctacagtagattatcaaaccacccacaccagcaaaccatagtaccggaccctaaaaggctaaaactctacctaataaaacgacaaacaatgaggccataggatatgaattgaagtgaaccaatggaagacataacaatgcaactactggtctctgaagattgcacatactaaattgaaagtaccaatatgttcaccacatgacaaggatcttcttaaaagtgtgccatccagggtgatagcgagaacacttggctttgatagcatgtcaagtttcatgcatttagttctacttcaacagcacaacatgagaaacaccgtagatctgaaacaaaataacacgcacaagcttataacttataagtgcatatacggcgagtgcaaaatacaacatggaagtcaagaggtgaacctacgccctactggagctggacattcgagaacaagcaacaaacataactacaatccacattaacatcaatactaaacctagagcagctaattactctaacagctcagttcattgccaattccagcttctaggtaggaaacaatttattatatcactagaaccaactcagcgcgcatatcatctgtgcacaacttaaaataaataagactgaagtaacaatgtcctctgatcacctaacctcattatccatgctggccttctttgttcttgtcgatgtccccttactaacagggttggaacaaagaaatcagaccctgaggatctgcagtttagtggagaatgcaatagcgacccagtcaggctgggtcgctgaccattggagctgctcaatctctgccccagcagtgtacgccaatatgggatcaagaccgccctcagctgccgcagcagctgcagcattgccatttccattgccaccattgttgctcccagtgcccatggatgacaggtcccatataagggcctgcgagtcatccccagctgtgcaaatgtgacaagaggagtgtggcgcccatgctatggcgttgacgggcgaatggtggcggtggagctcgaccaccggtagtgttgggtagcggatatcaagcacgaccaccttggggctatccatgatgatggttgccatgtacctagggtcctgcttgttccaccctaacctaaccagcggtgttggcgaggcagcgccgccatctgcacctgccgaattggagctgccgccagaaccggactcgtagataattgtggaatgctccttgtcccggagatcaaacacgcgaacggagccgtcggcggagacggatgcaaagacgccggcaccgccccaggcgatgtcgtagacctccttgtcatgggcaatgagctgggtgtcgacggcctcccgctcgacgtcccagatggtgcaggtggtgtcgatggaggaggtcccgatgcggcgggggtcggcgtcgttccagtcgaaggaggtgagcgggccgcagtagtcgctgttgcggttgccgttgagctcgcagcgcagctcgacgtcgggcgaggcggtgccgttgcagcggacggagccggagttggagctggcggcggcggcggcggcggcctcgtccggggaggggatgcgccagatgcggaggtggtcggcggaggtggcgaggaggtcggggcggacggagtgcgggtccgggacgaacatggtcttggtgggagggtaggggtggtcgaaggtgaggacgggggcgatgtcgccggaggactcgtcgagctggaccacctggacgtggttgttgtgctgctcgagcaggctggcgatggcgagccggtacttcttgtcgcgccgcacgctccagttcatgccgtagatgtgccacccggcctcgtacgtgtagatctccgaccgcttcgcctccccgccgccgccgccgcggcccccgccgttcccctgctcctgatccgcccacgcctcgccgtccccacccgcgccgcctcctcccatggcgccgccgccgccgaagccgagttgttggggggaggggattgggtgggggatgcggatttttgggggggggggggggggggggttctactttctaggcttgtagatagaggagaatgcggatttgggggtttcgcttcgagttcgaggtcgacgagacgactgggtggagacgggagaggagagacgagggggagtagtagcgatgtaattgtgctggcctgggcttatgggccgggcttgccctgggctatctaaggaagggcccagcattatgtggggggaaaagtataccgaaggtcctctacttgtcatcgagttacaaaatcgtcccctaaacgcaacatgagacagctgagtcagtgtgagacccacgtgtcagaatgccacttcatccccctccgtctctttcccctcctctcccttcctcctctctctctccctctcctctcgggcaagctagccggcgggtggggatgaggtcgccgacaacgggcgcgaggacgagggggtcggcggcgacaggggtgaccgggtcgacggcgttggattcggtgacggcggtggcggtgatgttgaggacgttggagatggagatggcggaggcgtagagcggtggggagcagcggaacacgaggtaggcgtcgcaaggccccgtggcggtggcggaggtgacgtcgtactcctgctgcgcccgaggcggcagccgatggccctcgcccgcgccgtgccgcgacggcgaggagaacgaggaggaggacgagcgcgagcatggcgccgccgcctcggatttgccgtagcctcttcgccatcggcgaggtctgcggccgctgccaccaccaccaccactagggctcgggctccgccgccgccaccactcagccgcggcgaggaggacgaggaggaggacgagcgcgagcactgcgccgccgccggccaccgtcgatggctgagaggctacggcgaatccggatctagccgcctccaccatgggcgccgggtgccccagccgacgccgtttcgggcggcggcgagacggaggggaggaggaaggtgtggcggtgaccggcgcgcgggggaggaggaaggtgtggcggtgacctggcggcggccggcgcgcgcgttggatgcggacgcgcgtcgctgtaccggaaccgcctcggcccgctctccacgaagaactcctcgtcggcaagctcgtcgtacaccatctcgtcaaagatgtcaccatcggcgagctctccggctttcctccattgtgacacgaaccagagcacccctatggcgacgagcacaagaagcaagctgtagagtcccaacaccacccacacgtccttggggtcgatgctggtggtgaactcccagtactacacttgctgcagctcggcggcctcgcccgtagcggcgaagaagccgacggcgacggcatcggggaggtactccatcagatcgacggcgtaccagagcacgggatccgtcgggccgccgccgcgtcgccgtaggagagcgcgacggtaaggttcttggcctcgccgtcgtacgcgacgcgctggtgcgccctccagccgtccttcatgctggtgggacagtcgacggtggcagagaagggagagagatgagaaagagagagaagaggggaaaagagagaggaggctgatgtggccacgctgacaggtggggcccacgtgggtcccacgctaactcagctgccacgtaggataaaaccagagtcaaaaccacctaatgacctatcgtaaccggtttcgattagttaagggacgttggatatctggttttgtagttagatgacgatttagtaactcgatgacaagttgagggaccatcggtgtactttttccttatgtgggctcggcaggttgggtttggggaagggaactgaaattttctttttctgtaaatataaaagaataagttcatctaaggtcccttaacttgtcaacgaatccgatttttgtccctcaaccggaaaaccagatataacgggtccctcaactatcaaaaccggtgtagattaggtccctcaacggttttgatggcggttttggctgacgtggcgtctacgtggctaatttgacttggtcttcatctgatgtggcattgacgtggcgcttacgtgacaatatgatccggaaaaataataaacttcgcgggacccacatatcagtttcacacataaaataataaagaaatggtggtgcccacgtgggccccacatgtcattctcggcctcctccttccgcctctttctccacctcccctctcttcatctctctccgttctcctctctccaggcgccggggaggtccggcagccggcgctacgcccgcggcggcggcgcagccgagggggcagagtggtgcagcggcgggcggacgcgcggacggagtggcggcgcccgaagccggcggggcggcggagccaagcggtgagcgccagcctcgtcgtcgtcgtcttccagcgcgccaccaccctccacgcacgcttcgttgaatttaatgaaatttcgtgaattttatcatctcttgccctctccccgctggcttcgcgcgccgccaccgccccgctccgctggcttcgcgccgctgtgcgccggcgtcctcctgccgcacgtctactcctcgtcgtcagtttgggcatcatcgtcgtcgtcagcttggtcaggagcagcttcggatttggcagcgactacagaagccggcgcaggcagctcttgcaccgcacgctccaaccctaaaacgaatataacccagtgaaaaactacacaagcacacaatggatcgatcgatacaggctcacgacgacgatccgtggcgcaaattgctcagatcaggagaagaaataattgatccgccgcaggattacagtatcagaagcagaagtaattgatcagcacacgatcgatctatgcagggtcaggattactacctgcagatgaacttattcctaacactaataaagtcaaaagagaagcccaccacctcttggcgcgcgcgtccgcccgccgctgccccactccgccccgtcggcttcgtgccgccgtcgccccgtcggcattgccggtctccgccgctgcctcccgcatgtccgaggagaggggagagatgaagagaggggaggtggggaaagaggacgaaggaggggggcccacgtgggccccaccatttctttattaatttatgtgtgaaactaatatgtgggtcccgcgaagtttattatttttccggatcaaattgccacgtaagcgccacatcaatgccacatcagatgaagaccaagtcaaattagccacgtaggcgtcacgtcagccaaaaccgccatcaaaaccgccgagagacctaatttgcaccggttttgatagttgagggacccgttgtatctggttttccggttgagggacgaaaatcggattcgttgacaagttaagggaccttagatgaacttattccaaatataaacaaaagttgacaagcactgaaatttatgtgtcctgagagcaaagaggtcaacaacataaaaaaagttttgtttcagcttccagattaaaagcatggtgcctaaatttgtttcatatccaagcttgtttcggctttcgctttaacttggtatgctgcaattggcacgtgcaggcagagcaatggagaccaccacagaggctgagttcgatacttgctgttgggaactacgcgcagctagaacgatttattagtatattattaattaagtattattttttttctgaaaaataatcaaagtaacttttgtatattttttttacacaatacgcactgtttggtagttgaaaaaatgtgcatgtagaaaataaaggagataatttgggaacttcaagaaaacaattcagcgtagaaaagcccgctcaggatttttgctaccatagcaccgtaatgcccaggattgcttgctattggggtgactactgttgtggcaatgatgctcatgatataaacagttcctatcttgtttatttagtttgttaattgcgcttttgtgtatggaaatggtaatgtgttgtacgcatggtatgaagtaattcgttaattatgcattaacagtgttttctatggatgggatcataatgtccagtcatttttaaaattttcatagtacccttttaggatccattgccctagtacatgatatagcaaaagttcaatgcattaaatttgtttgaagaaaattattttaaattttcaacgcactgattattttagtctcataaaacacacctatgattcactcatgaatatttcaaactttatcaaattctctgccaaccaggcactcagcttccagcaactcctccattctcaacggcacaatgaacatttgcaaacaaactaaccagtccattgaaggaaacctaatggtaggggtacataagggataaaaaaaattggaggacatagaaaggattgagtaaatttcagggtacagaaggaattgggtgagttttgaagggcacacaaggaattttctcttaaataaaaggaaaagaaaatgcagattaggtagtggtgctttggtgtgtcccatattgcatgggaaatttgattttattatggacttatgccacattttccctccgttcaataaaaacaaacccagtacaagatatgatacatcttagtactacaaatctgggtgagacgctttagatttgcagtactaggatgtgtcacatccggtattagtttttttttatggttatggatggagtatagttgagagtgttactatttgtccatgatttactgacatcttaaaaaatgttataaagttgatgcactcttttgtcacaccacctattgttaccaaggtcacggacaaaataaggtgagctttcaacaaaattttaatgagattagtgatgtgttggatttttgtttcttgaatgtgtgctaggggatgtagtcatgaggatgtgagtgtaatgtggcgttgcgcgtgcatatgccgtgtaatcgtaaaaaaaagagaaaatacgagaaaaaaatactttcatccttgtaatgaagtgaacttgagatgtttcaaatactttccactgtttcagtaaaaggtgatctggagtaatttttccatttggatagaaagtagtatgttttttaattaatctacattttaaaggtgctgttcgaagaataaaaataaaaagttacagaaaaaaattataaaccaacggctgtgtttagttcacactgaaattggaaatttggttaaaattgggacgatgtgatggaaaagttgaaaaattatgtgtgtaggaaagttttgatgtgataaaaaagttggaagtttggaaaaaaactttagaactaaacacggcctaacgtataagagtaatctttaggccctgtttagttccccaaatttttttcccaaaaacatcacatcgaatctttggacacatgcatgaagcattaaatataggtaaatgaaaaaactaattgcacagttagagaggaaatcgtgacacgaatcttttgagtctaattagtccatgattagccataagtgttacagtaacccacatgtgttaatgacgggttaattaggctcaaaagattcgtctcgcggtttccaagcgagttatgaaattagttttttcattcatgtccgaaaaacccttctgatatccggtcaaatattcgacgtgacacccaaaaattttcttttcacgaagtaaacaggcgcttacctgagtgaaacaccaattttctggtccgtgcgtgcatccccgtgggggtgggggggggggcatgtcctcgtggggaaggctgtcacaaagaaagaggtcgggacaaacattgaaatggacacattcctagtgaatgaatagaccttttttttttcaagatcagttttgtgaccatggaaggctgtttaaatcgcttgttttgtcaatttcatgtatctgtttcagagtccaacaggcaaaaactatgtttaaaaaataataataatatggtagcttttgatgtacaacactacggacatgtagttttagctcatgaacacgataaaaatttaatctgtaaggaataaacacttttaaagtttaattatttgcattggataccgcacttagaatttttatttctggttgaatagaggatttttatttccggttgaaattggacctgtttggtgagatgcacgtcagctctcaacttctcatgtctctcttctctcttgcttcaaattttgcccatctgttaattcctaggcgcatctgggaaacctgtagtgtgagatcatgacattactgtgacacagaaatcacgggaaagtggatcttgtcgttctgatctgctgattctcccatttaggattttcagcaatttcctatgtgcattcctgttttgggcggtgagtattttaccatttcctatgtgcatttaggattaaccaagtcacgagcccatcttaatctacttagcttaattaatcacgcagcataatccactattaattccacttgatcaactccaaaaatattggtgcctcctacaagggactctcacgttgagcagcacgagagaatttcatgcttacaaaaagcagaaaaatcgaacacactagcacactagctagctcggacaagaataaaatcatgccaacggatttattattacctgatccaacttaattacaggcagacgatggaaacacgcatatatagctagctaattaatcaaccgatctctgtacttcacctagaggtagccgaggagatggtccgcgaaggagacggtagccgccgccgccgccgccggagacccagcggcgtcggacggtgacgcgccgccgccgctgccggccggtaggtcccacgggctatcctgaagctccgttgcaagtggagccagcggccgccttcctcctgccgccgccgccgccgccgccttcttctccggcttcgtcgtcgtcgacgacgactgtacctgcagcagctgcagcgctaccgccgccggccgccgtccccgccgccgccgctgctccctccgcttgtgcacgtactcctcgtggatgaacacctccatcgatccctgcctctccggcaacctcccctacgcctagctacctagctacctatactcgcaaacacgagctagctcattgcaatttcgtggtaattaagatctagagaagacgaggcagcaaaagcggaggggaaaaaattatttggaggcaagcacagcagagagggcagggttgaacaaagctgcaccgaaatatataggaccccttctccattaattattgctggatttttcacaatttagtccttttaaaaaacttatttcgcaaatagtcactaaaaaaacttatccaaaaaataatcattttttgacgccagagtcactggcgccagcctccttccactgtggcggggcggcgctgaggtggcagggggagcgcgccaatgtggttggcgccgcccccctcccccaccccaattttctttctctcattttcttttgatatttttttttcacacttaggagcacacaagaaccaaccatagaaaaattaaacttaaatggataaaatatgtgacttgtagaattttacaaagctctgctgaaaagtcccccccccactccccgcgctctctccctgctcttcgttttggtttttcatatagtaaaaaaaaggtagattagatttcgaacactcttgagccttttttttacatcttttacatcctataaaaaagttagggtttgtattttattagttatatttgggtgtcatttcttaaaacaggcgcaattttttcatactcagaatcaggaaaataatataaccacggacatctacagaaaaagttacatccgtgttcgatgaaattataatctccaaattccgcttgtaagattgtgttttcgaggcgagaaacttttcgacagagctttaaaaaattctacaagttacatatttcgtctattttctatggttggttgttatgtgctcctaagtgtaaaaatatatcaaaaagataaaaaaaagttgtacatctctctcctctacactaattaaaatttttctaggaggggtgggggacaagaggacggcaccagcgactctggcgtccaaatagacaatttttaggacaagttttttcaggggtttatttgcaaaaaaaaagtattttaaaagctccaaattgtgaaaaatctagttaattattgtcgtgcttaggttagcttagccacttgtcctatagctagtgacggtaagaaagcggtgacagttaattaaccattgatgctgaaccaccggacccacctagcgatgcggagaaaatgggcagtacacgtgccactggttaatggacctgggtcccacgtgtcatactcacaaatatcaggtgtctaatttgcaatttgtacaccgtggtgtttgaaaccgatgaagttgatgattaagttggctcatgtagaatgagaaaggttaggttcgcgcacgtaaaatgagaaaggtgttgacgcatgattaattaagttttaattataataatttgataaatagatatatttgatatttcaaagcaacttatatatagaatgtttttttacagaacacaccgtctagtaatttgaaaaatatgctaacagaaatgaagataaaatccgaatcttatagcaacttccatgtttaaattccaacatttttctttaaatttttaacttttccgtcaaatcgaacttttttacacacacaaacttccaacttttccgtcatattattccaatttcttcaaactttcaattttagtgtagaactaaacataaccatagtgtcatgaagaaatttttccacaaaaatatgaaattgactgggtaatagtagtagtagtatgtttttctttcaggaatctgatgctttgtttcttgtgggatacaggaagcaagtactaccactgctgcttctctctctctctctctctctctctctctctctctctctctctctctctctccatccaactcgatcttatccggttgccagcatcaagggtttgctgtttcttgtccccatccgctgttagggctttgattaatgcttaagatgcggtcatggatgatgtggcagcctcgcagaattattattattattcgggtggatcaatcaggcgtgtcctccgttttcgttaggctcaaaatctgaatcatggcgagtggagaaccatggccttctgtctgcagcagttgacgcttggattgacaccggaaaggaatcttcgctgcgaaatgaaagcagcacagcatctgaaccaaaccgcaaacaggtatttgtgcgatttggaataggatttgatacggaaaacataaggcatcgtcgggccaccaaatataagcgatcctggctatatacatggaccttttttttttccaacaaacctaatcgatggttattttaaaatcttcgcattttcaataagtagctcgttttcaacttttcataatttcatataatacgcatacgcctggttatattgtagcagtatctggacttgaatatggcaaagtgttcattattttacggcactgtgtctgtgtgttctaacccaacttaaatccaaaattcactgtagacatttactacatccttttccttttttaatagatagcagcattaacttttgaatacacgtttgatcactcgtcatatctaaaaaattatttaattatcatttttttgttgcgagttgttttatcacaaaagtactttaaacataatttatatctcatacatacaatttttaaataaaacgaatgatcaaacgtgtttctaaaagttaacggtattatctattaaaaagggatggagtataagcttttctccatttcatgtttacttttgttcagtaaggaaacgttaaacgtcttataattaaacaagaagtataaagaataaaggggtggaggacatgccgaaatgcgaaacgaacaagttcattttaggtaagaagctcaactctcaaaaccagtacaaccaatatcctaaggcaatttggatggcagtttcattagatatgacatctacgtggctcatttgatttggtcctcgccacacgtgccattgacgtggcactagaagcaacattaaaaaaataaaacaaaatatgtgggccctagtcaaacaaaaagatagaacaaaagtagtgggccacacctcctccacctccccctctctcctccaggctccagctggtgacactacctttcctttcttccctctcccttcccagatgtggccagcggcagatgtcgagctcaagcgtcatcactatcgactaccttcgacacaactcctccctctccctttggcgcgcatggcggcatggcagtggtggtggccggcggtggctacggtgagcggttggcgaggaggaggctccgttggtcggttggaggcgagatgagggagccagtgagctcttcaaggcgagggaaccagcgaggagggggccacggctgtccgtgtcgattgaggaggataggttggaggcgagggagagggacgggttgggccgcctcatcgtcaagctcgggttgcgccaccttgtcaccgaggtcaagcttgcactagactcaagcgagcaagcgtcctcatcaatgttgacgctccaatgtctccccccaaatccttctcccctttccttcaaatcgtgaaggctcgatggcgctgctcctctagcggctagtgccatcaaagttgaaatggcaagccgccacggtcggccgtggtgacaatgttctccttgccgctattccacatgatggttttcaagctgttgacgtggaccatctccttgaggcattgacgcgttgacgaggattgctcccttattccacataatgggtttcaagctgttgatagtgcacacgttgacgaggaagcagttgagaaggaggaagccaggcgaagcttgtggaggataaggaaggtggtagtggaggcctcggagtaggggcggctgaatcggaggaggaggaagctgcatcgaggttgccaatggcgaggaggacgggtcgcatttggaccctccctgacaagtaaggagctgctcgccgctagcgtgcctacttctcttcgtcactgcactaccatctggaccaaccaaccgaggtcaaggctgaggctagctagactggcaggaggaggagaagccgaggctgcagaaggagatcgacacgtgggccctggtttttatttcttttcttgggactgattgtgggttttgctattttttatatatttttttctaattgttatgccacgtagataccacatcagatgaataccaagtcagtgcaccacttgggtgccacgtccgccgaaatcgctatccaaaattgccttgagattatttgtcctagttttggaaatagaggaatgtgttatacctgattttatacttgaggaatgtgatccaaacttgaccctcagataagggaccaaagatgatttcaaatcgaaagtcattatcaacgagtccgcatttgccagtacggtatatatattttacactaaagttacttcaagaaagtaccatttacgctatatgctgaaacacaccatgaaagtaatatttagttctatatcatgacggaattacttacccaagtgacaacaaatctactactactgtatagtaccttagggcagatgtcagcatctgaaagaagatatcacacgatacttttaactagagaaagagacaacggagatagaagattgttgctgtgtgagttgattatatattgtctaaatataacatgaaaagattatgtgacatcttttcttactattttcaaaaaaaaatatgtgtgcgcactgtacatgccacataactttaaatagtcgcgaaattgcctcctaataaactcttaaagaaagaaacaatgactagcaacatctctgacaatcctattaaaaacatccacatatacgtgatatttatgagcaccaaggacttcatcactacactactggcgctttctaaggttgtccgaactattattcatgctctggtacgtgcctttttttagatacaatggaacaaacatatagtatcaaatacacgtcgggaaccaacaatttgacaatgaaaacaacatgattttgttccttgtaggaaaaaaaagagctagcagcacgaagtgaatgtaagtcaactgattaggttttttatgatggaacaagcccaccaagttacaaattttagatttgacatcgatactctatttacggctaattattttttagcggtagatggcgtatctctcgacaatgatgtgtcgactttatcaaaatatacctcctcagtcttttagaagtgctcatatgtgttgtgagtgcacttgtactgtctttcgaaggaaaaaaggagctagcagcattttattttcgctcgatattgtgtgcagtacctcaagaaattacaggtgcaattctattagcaagtacaagtaaaagatttggagtactagagttgctaagcaggcccaaagagtccaagtaagcactctccaaggcccaaggataggcccacagcccaaaccaagatacgaatatatttcagggtgctatttgcaaatttcttccactctattcatccctccaacactaacctcgacggcggcggcggcggcggagggagaggatggaggcgatggccggtgagctggagaggctgcgggcggagagggaagagctcgatagccgcatacgcctgctagagtcgcagctcggggctagccctacgcccgcgggagagggcgacgcggcggggacaggggcaggaggcggaggcggcggtggcggcgccaccgcgtgccccatacgccgccgtgggaatgggttcgccgccgccgatggcctcccggccgatatgatctaccggtacagccgccacctcctcctcccggacttcggggtcgaaggttaagctcagctgctcacacatggcgcgttatcgtagcctcagcgtagtggagactctagtgactttttgttagctatgtcgcaggccagcgtaagctctcgcagtcatcgattttggtggtgggcgctggaggattgggctcgcccgtggcactgtacctagcagcttgtggtgttggtaatgttacttcttgttggttgttactgaagctgttcttggctaattggttttagttttataaggaagcagttagattgttctgaatttcaatgtgctccaattattctccttgttgagaagaactaatcatgtttgtatagctagctgacggtgggattagatggattacttgtgatggtccttgactttcttggagtaggtaattcattgctttcttgcaaccttctgtcttcctaggttgcttgggcattgttgatggagatgatgttgagcttaataaccttcaccgacaggtacagataatttggcgtgtattttgtccatgtatcttctgttctctaatactttcattattttcccttctgaattatttgaatgatgtttgattactgattgataaccgtaggaacataatttgtattcactttctagctagcaacttcataatcactcaacagtgggtcattttgttctcgaaaattcacgtggcatgtcgttctctgttttttttttccccttgaatgtcctctcagataatccacaaagaagcatttgttgggaaatcaaaggtgaagtcagcggctgacgcctgccgtgagtaagcatctgtatttttaacagattgtcgttatatagtccatccattgaaatatttatggttcaaagaagatctttcatattgaggctactgcttctgtaatgtcaatatgctatttctgttcaggattaattcgtctatcaacgtgatggagtaccatcatactttgaaaccttccaatgctttggaaatcgtgagaaagtatgctatcgaaacattaagtgtcttgagacaatatattgtgccttttagagtttactgaatttttttttccactgatggatcaatcacagatatgatatagttgtagatgccacggacaatcttcctactcgatacatgatcagtgactgttgtgtgttgctgaataaggtaaattcttgcttccgaggtaaataatgcagtcaatacttcaaatgttcatcaggggaataccaattttcatcttagcatgtaatttagtgagtttcagtcaagatactgagctgttgtgtactaacaactaaaataacttatgtttatttcacttaccatggtttcattgatgaaatactgatctttttaataaattatgtgcagcctcttatatctggtgcagccttaggtttggaaggacaggtaaatctcattactcctgataatcttcattcttgtagttcactttattctttttttattcatgcactgacttctctaacagttgactgtttatcatcataatggaagtccatgctatcgatgccttttcccaaatccaccaccagtggcagcctgccagagatgctcagacagtggagttcttggggttggtaagtactgagtaaaatattaacgagtgcttcttggtcataacaataacttcccagaaggggaaacataagttagaatatttattttaaattttgttcaaggcttgaaccacatacacaagcttctttgttttcatagttactgatgcttctgaccatacaaatgaacaatcactttataggaagtgaaacatcagttagaatatttgtaaactttacttaagtgcatacattttcttatcctttggtaaattgtaaaaacatgaattacttgctcatagtatacaaattgaaattttggtcattcccacctatgcacctgaacctacttctccgtacagcctaggttggctggctacaaatattgtttctgttataggtagaatatgcatatcatactgtgagtatgaagacattgtactgaataagatggcataaacttcatcccttgattccatcttttctgtagataattttgcactagtaaactaactactctttgttgacctacagttcccggagtgattggctgcctgcaagctctagaggctataaaggttgctactgatgttggtgaacccctaagtggaagaatgctactctttgacgctctatctgctcgtatcagaattgtatgccacttgactccagatatgtcttgtgttgctttctatttcctgtactacactattataccatgcatcaatttggttgctacttgaacaagatattcacacattaggcagtttaacgagaaattgcatatcttcatgttatcttgatgaaattcgacaatgtacctcgcactgtgacctgcctgctcattcatcatgctacatcataccatagtttaaacatgacatgtcaatgcatgtattagctattttagcaactgtgcatgagtgcatcacagtcaatgggcgcacgtagtctctctcgtatcttttatcttagcagcagtctactagctgtaattacaatataccaagtgggttaacctcatatggcaacctgtgttctctgactccaatcttgaaaatggccttcaaaataatatgtaatatctgtggtatatgttgtaacaagatcattctcagcatcactcagttcagggaatagtctgtcttggttgtgttcatgcagttcagattttgttatctgtacccaatttataacatagaaaaactggatttttggttagtgcagatggtttgttacggaaatggattatgaacattaagatagttttactaattttgctaactccttgtatttttgtcagcattttaagtactaatgatgttgaaacctttgctttaggaccaatttactgggaataacttatctatgctttttttatattctctgtttctgtttttcttctgcacaaaatacaaagttaattctgtttccttcactctcttcatgaagttcattactgaaacttacatatttctgcaggtcaagattcgaggaagctcgactgtttgcacggtttgtggagaaaattcagcttttactcaagatgattttcagaagtttgattatgagaacttcacgcagtctccaatgtctgataaggtatgtctccagatcattgacttcacaatttatattatttatcattagcattctgtatgtatcactgaattgaaaaaggaatgctgtctgtctaatctgatcaacagctgaacttaaatactacctgtctggttagcaagtcctttggatattgtatgttgtaatgtaaataaagtgagtttccctactaggaaaatttagctaatcgttagtctaatacagaaatatggagcgaggccattttagtggataccactaacacctctctacagcctgattcggattatgcaattaggagattggaatggggtaaaaagtgaatgaatttcaatataacatctaaaattcatgttctggaatggagtgcataaattttaagttatctgaaagaaagaaaaacattaaagttttatgccatttcacttgctgttgcgttctatgcagtcagctccaagtttggacatacttccaggaagtgcccgtgtcacttgtaaagaatacaaaaggcttgttgataatggtgaacgccatcttctgttggatgtacgacctgcacatcacttccaaattgcttctgtttctcaatctctgaacatcccgctctccgagttggaggagaagcttcagatgctcgagacctcgttgaaggacacgacggacgcctcctcatcagacaaaccgccttccctttatgttgtttgccgaagaggcaatgactcgcaaatagccgttcagcttctacgggagaaggggtttctttctgcaaaggacataatcggtggcttgcagtcctgggcacaagatgtagaccctgatttccccgtgtactagtgaaatggatatagtggtagtcacatttgagattacatgctcaatttttaaatctgacacgagatttttactggcttgtcatgagtatgtaaaatatagaaccgttaacttttcatccttgaccaccctaatagagtggtttgggatgacatgttaattgacggagcaatatggcttaaggctgaacttttttatcaaatattttgaactagtaataaattccataatgagcgaaatggagtataatatatccacaaaaatggtgtatcaagaatgttatttaagttctaaaagtagtacttttaaggtccattacacttccatccgttcaaaatttatgtagatcatagatattacttgtgcaaatgagatttttaaagtcacttactaattattgaaactaaaaaagtatttatggcttgggcacatcaacacgtcacgtaaaacgactccaatttgtgcgtgttttttctgttgtctccttagattgttcaaccaccttgaaaaagcgtccaaattccacgtgaactcacctgagttatgttggtgttaaactgttaatcgacctgtaaataatccaccacctgactacctgagcaaaagttggcgggaaccgatagatgagcaaagattggcgggaaccgattttaggtcatcaatttgtgcacgctgccagtccattctactgctcactctattgactgtagtaatactccctccgttttattaatagatccgttttattaatatatgatgtcattgacttttaaacacatatataatcatttgttttattcaaaaattttatacgaatgtataagatataaattgtacttcaaatactataaaacaactcataacaagaaatttttaaataagacgaatgataaaacgtgtaacaaaaatttaacagcatcatctattaaaaaaagagctaatagcatattagcagagtgactcatccaacacagttttggctaagttgcaggcttgcagccccactgctgctgtattacagattatactgtatattggcaatcgcagccatctcctccatttgtttccattgtttctaccgctgtcagcctaggcgcctagccacagcccaagtgaaagggattgacagtttcactgctcttcgcccatcctctcttaaagcaagtttaacagtacagcccactactagcttcaaattatcttaaccaatataatagccaattcatacaatagttgcttactatactattaactaacatggtggtccgcgtaatctacgcggctagcatcattatattttctcttatataatagcatatatgttttctcattatattattcaaatatattagaatgacatcataattttaaattttacaataactttacaaaactataaatatgtaatattcatattatattttataaacgtgttagttattaattatttttaatatctaattttagttatttgtaaattatatatattcctatatggactctagattcgtattttaatatttctttttttaattctgaattttctgtaaattgtatttctatatagactctaggttcttcttccaataatatttatttttatttctgaatttttattatttctaattgtatttctatgtggactctaaactcatctctcaatattctttaatttttaatttcgaatttcagttacttctaaattgtatttctatattgactttaaactcttctttccatgtttttcttaatttcgaattttagttatttgtaaattgtatttttatacggactcgaaactctacttttaattttattatgtttattccgaattttagttagttttaaattcctatatggactctatactatacttctaatattcattattttttaattccgaatttctattttttttcataattgtatttctatatgggctctataatctacttctaatattccttatttttaattccgaatttctattatttcctaattgtaatttctattatttcctaattgtatttctatatggactctatactctacttctaatattccttattccttatttttaattccgaatttcaattatttcctaattgtatttctatatggactctagtatgctcttctaatatttcttattttttaattcccaatttcaattatttctaaattgtatttctatatggactctagtctcttcttctaatattccttatttttaattccgaatttcaactatttctaaattgtatttctatatggactctgctttttctttttctccgattaatgtgagaatttctaggacgcgactacacgtcggtcgcccgatggagagcaggggaaatcaggcgctgacgtcagcatgacatcagcgcccgatttacgtgcaaaactattttaaactgatttttctcttaaattacttatccaaatcatgatccgattgtaccattaaattcgttgcaattaaatcttcaaaacaagaccacacatggatatattctgacggaattttttttaacttattattgaattatttttaaatgtttcacgatgttacaccaggtataccggaattgtttcactaagtagatcgaaaatgtttcactcggttaaatcaggtgttgtttcaccttatataaaaacaatatttcagcaaatagcgaaataatatttcagttcactacaacattagatatatacatagtgaaacattgtgagtacactaggtgaaacatttttcggtggaacaaaaaataaaccaaatttccttaatagggggttccaaaatatgtgggttattttgttgcaatggaatgtttcgttcactgcaacattagatctatacatagtgaaacattgtgagtacattaggtgaaacatttttggtgcaacaaaaaataaaccaaattcccttaatagagggtttacaaaatatgtgtttgatttgttgcaggtgggggcaggtaatgtggtggggcctaacaatatcactgcgcgcgggggcggggccgcgggggagcgcccgatctttttgctcccccgtcggtcgaccgacgaagagcattatcggaatttctaggccatgaaagcgaacgtagaggctcttttttctattcctttaataataggaaaaaatacgaattaccccacccccgaacttttgcggtcgtccgaattaccccccccccccgaaccacaaaaccggatatttttcacccccaactgtgcataccggacgaaatacccccctcaatccaatccgcggtggttttggcgtacgtggcgtacacgtggcagtccaatcagcattctatttaaaaaagtttgtgggacccacatgtcatactcatcctccactcttcctctctctctctcactcttcctctctcttctctctctctcactctggtcagcggcaggcgggggacggtgacgcgggggcgacggctgagggcggcggcctcggcgcggagctgcggcgccgccgtgctggtcacccacgccccggcgctccggccccgcgccaagatggagctcggctgcctcgtgcgcgccaacatcgccgccaacgacgatgcccatgcctgcgcgctacagcaggaggacgacgacgacagcggcggacggtgacgcgggggcggcggcatcggcgcggaggtgtgcgttggcgcgcgcgcagcacgtcggcctccctctccaacggttgcagcgccggagccacccggcgcgcgcgcggagctcgtctgcgtcggcgtcggcctccctctccggcggttgcagcgccggagccgcccgacgcgcgcgcggagctcttcggcgtcggcgtcggcctctctctccggcggttgcagcgccggagccgctcggcgcgcgcgcggagctcgtcggcgtcggcctccctctccggcggggcagggcggcggagaggcaggggggacacggagtgtcggcggcagtgtacgcgtcgcgctagtcgccgacgctgtcgtgctggtccaccggtccgcatccgcctcgtctcgcgccgccgcccaccgcctgcctccgcgcgctgcatccgcctcgtctcgcatcgccgcctcgctcgcgccgccgcctcctcttgcgccgcccacccatcgcccgccctccccgcgcgccgcccacccatcccccgcgcgccgcccgccccattgcccgccccgcgcgctgcctccgcctcgctcgcgccgtcgcccaccgcccgcctcgtctcgcgccgccgctcaccgcccgcctccgcgcgccgccgcccaccgcccgcccccgcgcgccgcctccatctcgctcgccccctgcctctctcgccatgagacggtgatagagagagagaggaagagtgagagtgagaagtgagagagagtagtgtatgacatgcagggtcccacaaatttttttaaatagaatgttgactggactgccacgtgtacgccacgtataccaaaaccaccgcggattgagtcgagaggggtatttcgtccggtatgcatagttggggatgaagaatatccggttttgtggttcgagggggtaattcggacgaccgcgaaagttcgggggagggcgtaattcgtactttttccttaataatataatagatatctggtcccacctatcatacacacattatgtcttggagtccgtgctgtagctggctacaaatctgttgcccactgctcttctttcttctttttatctctttaaaatatgtttatagctggtttatagcctgctattgtacctcctcttatcaattatcatcctgctccgagcagttcacccacccggccctaccgcaacgtccaaatctccggttaggtgcaaaatatctgctcaataaacgccaccgcgcgtacacaacattcgatcagcagcaaacagcttgtcgagtcgatgcaaagaaaagaagacgggccaatgatcaatccccatcgtaaccaccgccacatgacgatgagccgatgttgttgatgatgatagagacccatcttttgcaaagaaaactcctttgacatactattgtgtaacgtgggtcattgatatgcctatccataagttgtgaagtctatatatatcggtcacttaaaatcaaagagtagcaaggtagagaatctgattcttgtagtctcgaaactactgtcttcctccgttctaggaaaaacttacctagaagaaaaacttatctataaatggataagacatcgcctaacacaacgaatctaaatagggtatgtgctcttctaggttattttgtgtggaacggaagtagactgcaacagaataggtcatatgcctatgcttatgtatggcagtggcatggcaaccagcagccaggccaaccactacgtccgtctccctcggtccttgtcgtgatcatcatcatcatcatcacagcacggtggtgcgatgcaagaattgaggatgttgccggtcatgtgtgcccatgtgtttttaccgcgtagtagtggtaaagatctgcctttggcttcacctttcaagttttttcacccactgaggaatatctatctatctatctgatgattctgatctcattttggccactgttgtcagcatcctgaattaccttacccaggagaaacctggatgagaaagaaatatcaacaaaaaacacaaaactataacggttgacgaacacaacaacacacactccctagtccccaaacccatatatatctgcccaggcaagaaccgggaattcggctagaaatgacccagcaacaaacgcaccaaaacggtcacgatcgtccttctccatcaccaatggctactcgccacccacaaaaacgaagatagtatctagtactatctagattgcgacaattccttgcaaatcacagctgacgacctcttcacccaaaacataaaaaatgcagtgatgacaattgcagataccgctcttgaatctacccacactggtattctgttaaccaacaaattaggagtactttcaagaacatcactaaaattcagacaagaactcaatcaaccaggtggggattggattatcaataggatggtaaaatggtactagtaattacatagtagagcagaagggtaacccttatctttccatttatcagcttatcatcatccaatagattataataatagagggaggagaagtagcagctactagccagtggagctgattcgagcaggggatgatttggagtttctcatcatggtgaagaggaaggtttggccatgtagtaggagagatcccataaagccaaaagaaggaagaagaagaagaagaaaaagaaaaggaaaaatggaagaaaaatcttccaagaacatggagatcacaacgagggaaatcaaaaataaactcccttccgatgatatgatacgcgatgctcttttttactctcttctcccccactctgattctcctcctcttcttggttggttggtttcttggtgcggccggggaggtcaggggtcactgggcctcgacggtgcgggaggaggcggaggacggccggggcgcggcggaggcgccgccggcggccggggaggtgggaggggaggggtgcgggtggccgtggccgtggccctgggagttggtgcggtggaggcggcacttgaacgacccggcgtgcgtcgccggcgcgcacacgcacttggcgccgccgccgccgccgtggctgccggaggaggcgttggagaagctccggcgcatcgtcctcggcgacgacgccgcggcgcccgtcggcgtggtgttggtgctgtggtggccgtggaacctgccctcgtcgccggtggtgtcgacgtagttggacgccatcttcttcgtctccgatctgatctgcgagagctgcgacaaagagaagaagatgaggcctcgatcaagaattcgcagagcttctataggcgcaagctggtagtggtacgaatacaataaatgcgtacataaacataaaatcaatgagtttaatcttggggtcagtaacgtcagagatctcttctctaaacgcagagcaatcaaaacatgattccgccatgaattaattcttcagcttcccgttcaagccagccaatccatggtggattgaattggcggttacccaaagcgagcagtacaaagtactaccagtagtagtactaacaaagaattcaattccatttactagtactgccagtatcaaaatcccatttatcaagagagtttcaggtgaagagttgcaaatcaattactccgtaaaactaaaaaggataagaaaagaaaggctattttatatacctaatataacgaggagtcgaggaggaagatgacgaagatggaagaagagaagaaacggggcggcaaaactgcgtaatcctgaccttggcgcccgttttatagtggaggagcgctaagctgccccgcgggcagggcaggctgcccattcccctcccccctgcccgggattccctttcgcgcccagtcccaaccggccactgctgcgtgcgacgcgcacacgctgagagagcggcctagctgcgcctgcgcgcggcgagagggcggggagagctacacgcgggactgtactaggctggataacgttattgtgcggtgctccatatttgaatattcaccgtgcgggtgtggcgtcccgcgcgcgctgggtgtgcccacggcgcgggccaccaccgggggacggggggcgggacgggaggctaattctgtgtgcggcggggggtggtgatgggcttaccaaccgtggggtagtggcggtttgcgaaaaaatatgaccgaatccgttgcttccagctaggctggggtgtgtcccgtcgttggttgatgcggctccacagtgcacaccggcagtggtatattacgtgtccgattgcccccatcaacgagggagcacacgtgcctcccggcacatcaccggtgtttcccttctatcacagcaaactaggtttaaatgatggctaaatttgccacaccatcacttagtagtagttaagttgtggctcgtaaaacgttagccacgcttgaatttggcttagctacaaaactgaatcaatgataagtggatccatttaaatgaaaagtataactagtagagtagttattagtgtggaaatcaaccaaacatatcgagatagagtttttttttttaaaacggagatagagtactcttgcattaccgtatttgagacgtgtgtggcgcaccgggagccggtcgtatgctagcaaggatccaaatacttgtactcgtccaagtgcaagcaaagatatccgcccgtatgctagcttggcgtttggactggtccggtggatcgccgccacgcacgccgaaatctcttgcacgtcacaaagcgagtggcagccgccagccgcggcggctgcttggtcgttcggtcgacggaagctgacagcttccagaacccgcgacttctcgggcctctccgttataaccacctcgcgccgcgctgtaaacttgtggtggtgtactggactgaaacctcatcgttctcatgctaatcacattgaatatttagacatatgcacagagtattaaatataaaaaaactaattacatatattacatgtaaattgtgagataaatcttttaaacctaattgctttattatttaacaatgtgtgaaacctctccctcgtccgtgtcagatactactcagtcaggtgaacggacaaaatacatgatgcatcatcatctatctatcgagtcgtagccattgcgtccgagactctccgagctactagtggttattggggtgaggaacagtgtgattcatttgtaaattaccatgaggaatactgatcaggtaagagtgagtggtccatgaccactcaccatttggattggcgtgataaggagacggacatgattgggagctagaaaccaaaatcaattgtggataaacatcaatggcggctagctaaggtgcagatgatctcactcacggacttcgcgactatcttgcgctggtaggtccaccctgtgctgtttggatttggacccatccatgttttattccttagatctagatcacgatcgagcgttaccctgattaatccgttcttcagctgcaggggtccggtaattgttaggtaatttacctttttcatagaacagataatcaaacacatgacaatttttttcatggaaaccagagctaccaaattttttatgcatacggagcaaatccatgaataccatcctctctagctagttgggcactctatcctaaaccagatgccactgttcggtaaaactccatccatgcgcacagatgttacacagaaaacgtccacgagtctgtgtacgtcttgatcgatccacacatctttgatggtgcaaattaaaggtaaacgtccgagcacacgtaaatacgtaatggccattgcacatgaacaagtgacccatgttacccatttctgtctgttgttttcggcagccatcgccgtcgaaacgtcgacgccttcatgaatcctccgataaaattgctacattactacgtacgcactaacgtgcatactcgggagagttcttaggctatctttgcaaagataacttggtgccaaattgtgtcttactaatcccttaccaattttcaatagtatttctagatatttggattggtgccaatatttaccaacaccatctcttaggtagtagtgtagtacggagtagcaatttgcccaatcaaatttggagtgccacccaaagatttttagaactttttggtagggctccacaaaccaaattgcccaatcagtggatgccactgtcagggttagatcttcccttgatacgaactctagttagattagtcggactggctatgtatcatttgatcgtattttataaaaaaatccatcaattttaattttaattataattacattataatattcgtgtaacttgtttataagcccacaaaattacatctagctcagtgggacagagtctcgtgtaaatggtaactgcagattattaagactgtttaggcctgtttagttagtaaactggaaatttttgggtgtcacatcgaacatttgaccggatgtcggaatgggttttcggatacgaataaaaaaaactaatttcataactcgcctggaaaccgtgagacaaatcttttgagcctaattaagccgttattagcacatatgggttactatagcacttatggctaattatagactaatttttttaacgactcgcacgaagttctattgataaagcaggaaaaaattactaagattataaccctggagggtcgtaaccaggaaaaaaggaaaaaatataacaccacccacataccgacaacgaattaggctcaagagattcgtctcgcgatttactgtaaactgtacaattaattttttttttatctatgttcaaagattcgatgtgatatttttgggaaaagtttttggaactaaacagcccctattaacattgtcgcaaagaaaaaacattgccattgcctaacctaaacactggccatataggcccagcggtcagatacggcgccgcgcgggggagctcggggggacccacgtacgtagcggggccgacgtgtcgggccggccatgtcgacatactatacgtactacagcgacgtgccatctgcacctagaattcgtgatgtgtacgcacttattccatttggttatgaaaacttagggtgtgtttagtttcacgttaaaattgaaagtttgaagaaaaaagttagaagtttatgtgtgtagaaaaattttgatgtgataaaaaagttaaaagttcgaaacaaaactcggcctcagtccacttcaaggccttggtccacttcagctagctggatgtactgcacgtacgttcttatcattatcggtggcagattattctagctagcaatataaatatcttgctagtggtagttatgaaaaagataatgtgcacatcatctggagtaatctagcaactgatagcttatataaccggcgtgcagtgatggatatgaatggttaggaaaaggatatatatgcgttctagtagctgattagatccctagcggaatgatatttgaacccaatagcatgctaagtaccagtataacaaaatagtactccatccgttccagaatagattcattaacatcaaatataaatataaaaaatgctataataacttacattgtgaaatgaaggaaataagaaactataggatatggaagatatatataatatacttcctccgttttacaatataagtcattctagcattttctatattcattaatggctaggatcgagccgtgcatcgtggtcttcaattatgcgtggcatcgatcaattctgttgatttacagtccaattagtttgatttttaatcccgattttaataacaaccagattgcaaatatcaattctcaagtagtggggctgggggacacaccccattgctacctagaattcctggaagatctagtagtagccccttggagtaaccaaaggttgttcatcatgtcaatcgtcatttcgtcatggcctcatgggtagaagtagcacctgtgtctggcccatcacaagttgattcattttcgttttcatttttctttttgaacaattacatctatgcccttacttttaaacctaactactgttttacccgtaaattttagggtttacagttttattcacactttttaaatctgaacaagtcgtttacccccacttctaacagccgtttagtgggtcccacgttttgtgttaaagaaataaaaaaattaaaaaaaggttttataaaatattaatttacccttgtaccctaagtgaatggatagggattgaatccctctcctcccaacctgaaatcctaacctatcggcggcgcgtggcagggcagcggcggcgagggcgggcacgcggcgcggcagcgccgttgaggacatgtaggcgcgcgcgccagcggcagcaaggacgggcgggcgtgcgcggcgctccggcggggcttccacgcggtgggggcggcggctgcagggctttcacgcggtggcaaagagccaaagcgcatgtcgagagaaaagagaaggggatccagcggcggcgcatcctccatccctaccgcccccggcaagacctctggcgccgccgtctccgtcctctccctcgtattgccgccatgcagatatggcatggttggagcatagagaggatccggtggcgccggttcgtgttgccgccagatctggtgaggcagcgtgaagacatgcggacggcgacgaagagcaactcctccatcccggcggctgccagcaagacctccgatccaccgcctctcagccatgccgttgcatcgggagcctcggcctctctcaccacacaggcacacatagaagaagcgcccgaatctggcttagcttcctcctctcacagtcacggtcacacaatagtcaataggtacagaatcacacaatctggaaaaaaaaataggggcaaaaatacaataaccactaagggtataaataccatttttctctacaactaacaccgttaaaccggctgttagaagtaggggcagacggttggttcagattaaaaagcaggctcctattgggagattgatcgccaggggcgatcggatcgggtctctccctctctccacttggtttctttttttttttggcaccgtattactttcttattttagtaatttatacacctaaagtttatacacctcaagtttacacatctaaaagttagagacccaaagtttataagtcaaaagtttatatatctgattcaaatttgaatttcaattcaattatatatatatatatatagtatttctatacatctaaaatttatagacccaaagtttacaagtcaaaagtttacatacccgtttcaaatttgaatttgaattatatctgattcaaatttgaatttgaattcaaatattttctatatatagtatttttatgcatctaaagtttatacacctaaagtttatagaactaaagtttataagtcaaaagtttacatacctgattcaaatttgaatttgaattatatctgattcaaattttaatttgaattcaaatattttctatatatagtatgtctatacatctaaagtttatatacctaaagtttatagacccaaagtttataagccaaaagtttacatacccgattcaaatttgaatttgaattcaaatatatacatatatatatatatatatatatatatatatatatatatatatatatatatatatattaaatttgtttggtgctccatggtacccgggcaccattgttgaaattgagtatatacccaattcaaatgagtatgaaactttttcaattacttaggtattaacattaactactttactaactagttcaaagcatgtttgtactgaatttgaacttgtttttattagattttgattctaggtatatagcatccatacatataattagttatgtatgtaatcatggattgtgaaatggtatatactcataatttaaaaatttttaaaaatttgagtgattttgtgcattagatactatggtgcccgggcaccatggtgcccgggcaccatggtgcccccatatgagtgtcacacacacacacacacacatatatatatatatacataaatttattttaactttatttttttaattttttaaatttatagtgtagtaggaagagaagaagaggaggaaggaaggagaggtgtgtacagggggcgtggggatcgatcgcccgttagcacacccaggtaaaactgcaaaccctaaaaaataaggataaaataataattagatttgaaagtgaggggatagatgcaattgtccctttctttttttgttttagggtcaattatccggtggcgatcaagaggttgtcgtcttgttcaattcatgtctgttgggcttgacgcaatccaacatttcctttaatgatagccaaaggcccaataatccaacaaactaacgggactggttaggctgctgggattgggctggccttctgtgtccagcaatccaggctcatctacgagactatgacgacgactcgacgagttcatgcacaacaaaagcttgcatcttttcagcttcagtacacttatggaaaaagtctgagttgactccctcaaaattatatagatcagatgtaatttatatctctcaaccgcaaaaccatatgtaccgactctccaactattaaaaccggtgcgaaatgactctatcgacaatattgatggtggttctcaccaacgttacattgcatgacctggtccaatcgaccgagtcaacatatgggtccatgtgttagtgtcctctcttcttttctccctctctctttcctttctcttgctttctccacactctagtatcatttcctcatgtcggggcgatgcgagcccatggcggcaccagggagacgacagtgtctagggggaggagtttgagcggctagcgaatcgacaaaacccatggcgaggctggggttctccgctctcacgaatgtgctcgtcgtctcctaccttaagagcacccgcaatggtaaagtaaggtgctatctataaaacatatacatcttagcaatagactagattaatagtaaaccaccacaatagtatgtctacatgagtatctataactctctcatgcattgtctcgtttttctctatagactatctctaagttagtagatagttttgttctctctcttcatttaatatcttccatgtagaaaaatatgttgatatggatctcttatagagagcctatagataaccattgtgggtgccctaattggtgcttccttggtggcgcactgcaacctcgccaggtcacctgcatcgtgcttgcagccaaggtggagacgcatcgcctcagcttgacgcaccacccacggacccacttgtgtccaacctcctttgtggcagcactcacagccataaccggactcgatcggctaacggttgctgcagagaatgacggacgaccgctcgactacgccaccaatgtattgggacgacgtggcaagcacctcgtcaagctcccatcctgtcgcgccctactcaagctcctccgtcatcggcgagaacctgttgttccacgagctttgggtttgtagcttccgtgatagctgcctatggagagcaatgtcattggacaccttcttaatgatcacgccctttggtccgacgggggagtgtctcctgatgactactctcatgacgcgcaaaggagtcagggtacatcctactcccggcctccctgagctccggttcagcactggtgccaccgcctagtgtctagcagaagcggtgctgaactcctgtcggagaggacgacgacgatatggccgagacaatgagatgtacttgctgacatataggtcatgtaggtatttagttattttttatataatcatatagatgccacgtcagtacatttggaccaagtgaacgtgtcatgtcagcgaaaccaccattaatattgttgagagtcatttttcacggttttaatactttgagtagtggttactacccgattttgcttcgatccgatctatatttgagggtgtgaaattggactttttcctacccctacaaaagttcatcatccatgaccatgggcctcctttcatttctgtccactggagatctttttgtcccttcattttttgccaattgctgactgttactgattatcggtcctgacatccgttcgcatttttgctgacagtgcagaagcggcaatgctgaactaggacaaattactgattgccaaataacagtacaactcagtgagtgcatgtattggtgatcttatggctgcgaaatttgctcttattttcagttgttacgtcgctccggagtctgcttccgatcgagggtcacaagcaggaagagtattgcggcttttaccggcaggaaaaattctttgatcaacagaatgcgtaagtagagtatctggtcgttcacagttccacacaagtgacatccgagacactagtggagaaaccatctttggtcggtccagtaaaatccacaatagtcccggatcaaaaagaaccgggagtaaaaattatttttagtcccggttataaaaattttgatctttagtcccgattcatcccctgtcagaggtatgtcagggggtcgaggatcttgtcccggttggtgtcaataaccgggactaaagatcaccactttaatcacggttggtactaccaaccgggactaaaattaaacacgtagtatataatccctatcccttatcctctcctccacagttacaatttaacagattgaatctcaccccctctcctcagatctatcctctctaactctcttctccaactcctccccttcctcctctcctcccccttctctccccttcctcctccccttcccggccggcctccccttcccatccggcgggccggccggcggcggggccctgcgctacggcgcccgacggagggcggcagggccgcgcgcggcggcgggcgtggtgggcggcggggccgcggcggcggcgggcggcgggcggcggggccgcgcccgtcgttcgtggcgatcgacggcggcagcggcattttttttttaatttgtgatgattcactgagtgtatttaactgagaagttacaaatttgtgattcattgtttggatctgtgatgtatttgagtaatttcttaggatattgtgatgtatttatttgtgtgtataagtaactttgatttgtcatgtagatttgatatgttacttcgatttgtggattgggggtttgatttgggatatgtataccacttgatttgagagaaaataaaaaagaaaaaaaaaagaaaaaggggatcatctcactgccgcaaccatctctttagtcccggttagtgttaataaccgggaataaagatatttttagtcccgggtatttgaaccgggcgatctttagtcccggattggtagtcccggtttgaaaaccgggattacaaggagttgcgaaccgtgactaaaaagcatttctccaccagtggagtatctgcacaagccagaggtaattaagcatggctaaacatatcacaattctagctaggtcaatacaagtgatacaagctagttaaattaatatcccaggttatcaaggatggaatatcaagcaagcatggtcacaaacaagcagaaaggtaattcatattctcattatctaaaaaaattaattttatttacaaatgataaacattctatgaagtagtctcaacgtactaagggggggggggagggatgtgtgacttagcttcatgtgattactctcgctaattagcttcatgctgaccacccggtttcagaagatcccagcttagagaacgtgagtgccacctcattgctgttgcatgcatctcacattcccatggacccaaaagaaaaaaaaaaactcgtcactctagaattccacacagtcagcatcaacatggaggtatttaactctgaagaggattgcgtacctaacaaagttatactgcttttatatgaataaaacccgcaagtttatctgagacgctcatctgaaccgttcccttttttactactagtactactgtacgtgccatcgttccgaacgcttaattgggctgtggcatcaaacggcaaagtggacaaaatcagtgtgtcgccatcaatttggtccagctagcgtccagtcaggttcaagtcgatccaaattgaacagagtaacgtcggcgtcggtgccgatcattttcatcatgaagtcagtgctgatatttcatttggggacctttcaaatggatatttcaattttgtccataccaagatatttcagtttgaacatgcaaccaactccgtcttctcatttccttacccttcgctttcactatccaacatttcaaggcttagtttctttttttttaaaaaaaaggggaacacttggttcttttcggattatttactagaccgttgatttattctatgtttggaaaaattaatctttttcaaaagactttcttatatttgttaagtctatttattaaaatatttaatataccatataatcaagtagataatctgcagcaacaatgagctcaataatctgtttcaaacttatcggagtgcggaactcatctagtcaagaagtgagtacttgcccttggagattcagccatgggccaagtagcgagtcaagccctgatccaaatcacgagagtgataaacataagggattatacaggatcgggcacagatgtgtaacaccctattcttgtatatggactatggatgatcgggaatgagttacaatgagtggagtctaagggtggaagctaacttgcttcaacgagagctaagctattcgaactagttgaacccccctttttggtggtatgtatcctccttttatataccaagggagtccaaaatgccaatacatacatgtgagattgggatagaggtgactgtttcacctatcaattgacgagtggagcgaagaagtcaaaggtttcttcatctgagttgtccactggcctagctgccagccttcgagggcaaaggagggcacatggaatgcatactgagagggtgccacgttgcatgtcttttttctctagggagacgtgcgctacaagcgccgccattcctgccacgtcattggtaggctgtgtgatttttgattttgtcttagatgtctctaagcttgcgagagttggttgccccgagtatagcccatagagggccacgccagaggagagaagtgccccaagcacagcccatgaaggaccgcacccgagagcggatgtgtgaaagcccaacccacgggggcgcgattaatgaaagaagtgccccgagcatagcccgtgagggaccgtggctggaggtgaacgtgcctcgagtagctagtgatgggaccctagttcctatttctccgataaaactaaagaccgcgttattttaagtctataagtttttactaattagctacccataaaatgagaaatacgattagcatatgactaagtgagtattaattattaaaattttaaaaattaatttatttatttttaaagaacattttatatataacttttttcatgaaatataaagtttaactgtttaaaaagcgcatcaacagaaaatgagaagtagttaagctcaattagttatttggaacagggcctgagcctaaccaagatcagattttctgaacccatccaataaaggaaaaaaaataaaaaatatactctttttttttactgtttttacataaatatacacgtttagaagaaaattatagaaatatactatttttacataatggaagtgcgaaatcgcgcgttaccgcgcaagttcacgcggtgagggcgaaatagttaaaagagctaagggtggtagatggataaattgacatatgataaattgtatgtagactatttgtttgacatatgataaattggatgtagatggataaaaaagtaagggtggtgtaaagtgacacaaagataaaaattactgattcaaactaaacaatattgattaaatatataaatggtgatcaaatccgtacatctataatgataaatagttcaaagtggagtacataggcatgctgcaacaaacttgaaaaggcactagtatttcactattttggaactttttgagaatgatcaagctctggggccacctggacaggaaacttgagtcttacgagaagttaagtaggtgttggccaacgactgataagctgtaaaagaaataaccaaaataataaaaaaataatttatagataaaattttgtattgatattttttaaaaaattatatcgatgttcttagaagttcaaaatttaatattgagaaatagactaggatgaaaaaccatgcaatctttggttgtgtttggtactggtaacaaacagacaatgagagtcatgcacatgtatatatcgtggaatggactaacctcaaagtaggttgttgccgtgtcaccgtcgcaggtacgagttagttgccaccaaacaccacgacatgccaaccaaatgactgcagatgcctgcacgcatatggagtctccgaccgaatgacaagctactagtttgaggatgatttgtgggagcaggtggattggattgaaattagtatggtttcgcacgcataaaagagcgtatgatatgatgagaaaggaacggaaagagaatgattgcgcttttaaagtagtagagaaaacaaaactgaataatgaatgatttttttggaactgaataatgaattatttgaatttaccacgcctcgctccttaatttggacttatagagaattagtgacctctttgtatagtactactatatcagaagtcattataactggacataaccttgttgacacatgatttgacccgtctgacagtaattaagggtagtatcggactgcaatatgtccgttgttcgacaagccggccatgcggcgccgggttatgggaccagtcgaacgcccgctgttcgaacgcaggccgttcgataggcggcatgtcgatcctcccccgttcgattggtctatagatttgcgattttattcggatgccaaccatttttgtgatttttcattaaattaataatatttatatacaaatatttctctagatttgcgattagtgtatgatttgttgagttttaatttttataaattttgaaaataaaattatttaatattataaaacaacttatatatagataaaatttacaccaaatatatcgatgaacggtttaaaaaacgttctaacaaagatcaataattcaagagaaaatatatatcttaactagaaacgtctactgttcattaccaagatcatatgcccctcgtttgcatatacaagttgcactcccacatcacatctccaggaaggatcgatgatcgtggtaataatgttgacaaaaatgaaaaaagaactccccaaagagatcacatatcattgaccaacatcaccctacggccagctgtgccatgctaccacgtcccgcacgcacttgtcatgtgggtactaattaatttacggatcaattatactgacagcatagtttaattagcagtagcggtttgcacgcaccacacctccccatgttagattaacattagagcatgtacaatagctactataagtcagctataaatatattttaaagagataaaaaaagagagagaataacagcgggttacagatttgtagccaactgcagcacgaactccaagacataatgtgtgtatgatatgtggaaccagatattaatagtatattaagcaactattatatgaattggctattacattggttataaatgatttggagctagtagttggctatactattaaacttgctattatagaatcagggaggaaattgtgcagctcgtgcacagcgagcaatcgggtgataatatattcttatcttgattacctctctccaaccaacgtggatagatccagtgatcccaccaaccagcaacaaatggcagccaccaatgcaaatttatgacgagtaatgcaagactaatagtaacctttggcacaaacctgacttgagctttgactcttaagtagcggccaaatctgaattctatatttaattcatataccaggattttttttctcactttcatcacttagttttggctttagaatcgtcaaagagtagcgatatagaggtgttatccaaaattattttcccgtaaaagctcatacaggcatcagcacaaatttaacaagcacagattctagatatttgtcatgtatttaggatatatttaaattattactagatagctatgaatgaaagattaatgcatatatttaggatatatataatacaataccttttaagtatatttattacactttcttttttttaagaaaaagaaaaataagtgatcaaagttgtaatgagaacactacctagtgccaagtgatatatcttagtactatcatctgaacatgctcttatatctagatattcgtaatactacagtacaatatgtcactgtccattttaagtttatttattttaggataaaccgaataaaaattaactaaaccccaactcctaacaacttcaatctgttccaaccttttttccatgggatgcacggtgacttttttacaattcagcgggtcacaactcgattttgatttggcatcctctgaggaatgaattgtaaaaacaaaaaagggaaaaaaaggagggagaagaaaacaaagtcaacctctcgtcggttacattacaatttacaggagcaagcagcttaattagcaaaggctgcgtagcgtaatccgatcaccgatgtatccatccagcaatccatccaagatcgatcaacccctcgtcgtgatctcgtcgtcgtactattatttatagtccaccgctagccatcgcactctgcagcagcagcagcagccgcgcccccacacctcgcctcctcctcggcttggatctcgccgcatcatctgccgccgacgacgacgaagaggaagacgaccgccatggggacggcgagcggggaccagccggcaggggcgtcgtcggacaagctgcggcacgtggagtccatgtcggagctgccctccggcgccggcaggatctccgggatcaacgccgtcgtcctcggcgagtcactcgccgccgaggagcacgacctcgtctacccctccgccgagttctccgccgacgccctcgtcccctcccccaagaaggtataaaacccccaaccccaatacccaaacctcgcgtgtgatccctctcgcttccccattggggacggccaagattgattgccatggcgcttgctttagctcccgggagagatctttccgttttggggggtgtcctcttgacacttgggatcgtacgtcctgatcaagattgtgtgacaaaagtcagatagggacatgaatatcaatcactatgccaagaggaatcctgaagcttggatccaatcatttcatcctagtgaattctttctttctttctttgtgtttggtgattgtgatgtgctaaaggttgtgatcttggtgtgtgtgtgtgtgtgtgtttcatggtggacatcagtaccaaaagatgtatgagaggtcaatcaacgacccggccgggttctggtcggagatcgccgacgccttctactggaaggagaagtggaaccccagtgaggtctgctccgagaacctcgacgtcaccaaggggcctgtccagatcagtgtgagtgcgcgttgactaaatttctgcatttcgttgtgatggtgattttaagtggttctgaatcatgtgggtgattcttggggttgcagtggttcaaaggtggcaaaacaaacatatgttacaatgctgttgatcgcaacgtcgaggctgggaacggagacaagatcgcgatgtattgggagggcaatgagcctggtcaggatgggaagctcacctattcagagctcttggacagggtttgccaggtaaatgcacactcatacctgagaacgtattgaacaataggtgtttaactgtcaatgtgtgtcattggatgtttgtggaaaatgccgtaatataacgtgttgcgttatccttttcgtagcttgccaattacttgaagagtgttggtgtcggcaagggtgatgctgtgatcatctacttaccaatgttgctggagcttcccattgccatgcttgcttgtgcccgcattggtgctgttcactcggtaatggccacagctaaaaagctctcgtggttatcctggttaatccttatgatttaatgcatactgcaaaaatttctcaggttgtatttgctggcttttctgcggattccctggcccaaaggatcgttgattgcaagcctaagcttgtgatcacttgcaatgcagtcaaaagaggggtgaagcccatccttctgaaagatatagtggatgctggtctggctgaaagtgagaaacaaggagtcgctgtaggtatgcagtacaatctgaattctgcatccgcacaggcaattctaagctgttatcatttcttgatttgcataagatgacttattacttattaggagaataggaggtccattctaaatatgtaaacctttatagtgactgagctgtgggtgatacaatttatccagtttactgaaaaattgaacagaacacgactagggatttgaaaaaaaaatcactatatttagtttttaacataggcgttaggttttgcaaattaaatgaacaataacattataaccattagtatgtaaatttcaatatgtatccaatatttgctgcattttggctgaaagtttatataaatcacaagatgttcttgttggaaattttcttatcttgtgccatgtggtttattctgtgagcacatgaatataattgcatacaatatcttgtttacttactactactgtgttggacaggtctatgtttgacatatgaaaatcagtcagcaatgaagagagaagacacaaaatggcaagcaggaagggatgtttggtggcaggtgtgtgagtttcttccttcaacagctaccttgttaatacttctaatatacataagaaaatttcaggatagggatgtatattcttataacatcactgtcaattttccatcatctccttgagtcatacctttcaggatgttgtgaccagtttcccaaccaagtgcgatgtagaatgggtggatgcagaggacccattgttccttctgtacacaagtggcagtacaggaaagccaaaggtgcttatggccttttaattgcatatggcatagaattatcctattactgcattacccagatattaatctctttgaacatatttagggtgtgttgcatactactgggggctacatggtttacagtgcaacaacatttaagtatgcatttgattacaagccgtcggacatatactggtaaagacaagttctttttttttttaaggagatggttatggcattttcatattttggggaactactccgagaaacttctatttcctcatacaatctttggcctgtgtgtgtgtctcaacatcaggtgcactgcagactgtggctggattactggacacagctatgtgacgtatggtccactcctgaatggagcaacagttctcgtttttgaaggggtatatttctaaatacgttcaagttagtatgttctgaaataattgtggtttcgatatgattgcaatgtgatggtaaaataatcgtgtggttttgattgttgttggtcttcatatttattttgtctgacttatcttcttgactgacaactcagaacagtcatgccaaaatctacttttatttcccaatcagtgcttgacttctttcacttgttttatgaatttacttacatgccattatgtttaatttaataagttctttgttaggtattcattttcatttgcctgtcatcctttgcctgaagttttcctttgaaccataactgtagactccaaattaccctgattctggtcggtgctgggacattgtggacaagtacaaggtgacaatattttacactgcaccaacactcgttcgatcactcatgcgtgatggcaccgaggtacgcatggtgattctgtattgtgctctctcatttttccagtacaagatatactttcacaaaatctgcaagtgatacgaacgagccaatctggtgattctggatggcagtattttagcccccatcatgtcagtttgtctggactcaagttgattgactgcaatcaaccattgaattttgatatttgatgctgtttgctgaatcccaacctttgccaacctagttatactactaacatgcaaaaaagaataatcttgctgcatgtgtactgtgcagttaatctgcattagtggcacacttacattataaaacacagtggaactaatattaagtgtacagacagatatttcatgcaggcatcagcactacctatttggtacattatttgacttgctaagaaacttgtgacttgccaacttgaaaaatcgaaacttctacaagactgaattaattagctaattctgagatattttatctctgtttgtgagtaatcatcactgatttttgtttatatgctttgcagtatgttacacgtcactctcgaaaatctcttcgagtcttgggaagtgttggtgagccaattaatcctagcgcatggaggtttgtggagcatttatcaagtgccacagtactatatgtatagagttataagatatcagtttcatgcatggttgatttcatttcagatggttctacaatattgtcggggactctcgatgccctatctccgacacctggtggcagactgaaactggtggcttcatggtaagtaaacctctttatgttccacatctctttccagttttctcgtgagagtattaagtaactctgatgatcttcaatgttttgattttctgtatagatcactcctttacctggcgcctggcctcaaaaaccaggttctgcaacctttcctttctttggtgttcaggtaataatttatgtcttaaatgtaaagacaccattatagaatatattctcactaccttgtaattattgtaatttagaaaataccataataaattggaaggatttttaaaacagttacggtgatggcattttcctgagttcttcatgtttgcaatgtgattttattatgtgagacctttgcgatgggtattttccatgctgtgtttctttctaactaactttgctgtgtctgtttggtattcagcctgtcattgttgatgagaaagggaaggagattgaaggagaatgcagtggatatctttgcataaagaaatcatggcctggggctttccggactctctatggagatcatgatagatatgagaccacttacttcaagccatttgctggctactattttactggggatggttgcagcaggtagtgaagtctttccttcaatattatacaggattcaggtgtatttttttaattgcttttgtacttttcagttttccaaacaattttagctaaatagtatttgcatatcagggacaaagacggttaccactggctgactggaagagtagatgatgtcatcaatgtcaggtaagctgcttcgttaggtccatgttacttgctatggtttagttcagtgttcggaaattataaaattaaaactttttggcttcttaatttgtagtggacaccggattggtacagcagaggttgagtctgcgttggtttcacacccaaagtgtgcagaggctgctgttgttgctgttgagcatgaagtattgtccactgtttttcccccttgctccaatctctattgtgttggctatcctgctacatatgatgcttaatcaataaattgtctgcttcaggtgaaaggtcaaggaatatatgcttttgtaactttggtggatggtgttccttatagtgaagaactacggaaaagcctcatattgacagtccgcaaccaggtctgccttggtccttttggatgttctttctccatagtgacacgtgacaatgctttttattttttattaactttgcgcacatcatcaaaaagcacgaaaaacaacttaacatgattttatcttgtcttgtggcagattggggcatttgcagctcctgacaagatccactgggcaccaggacttcctaaaacgagaagcggtaagataatgcgcaggattctgcgcaaaattgcctcaaaacagctggatgaacttggtgacacaagcacccttgctgatcctggcgtcgttgaccagctgattgcgctcaaagattgctagattgtaaaaattagatgacagatgcacttccactgatgcttgtgcgttccatttctcttcctatatgatggagatgcactttctcttcctacattttagtgtccatagtctttcgtttattcggtggaagttgctcctggtctagggaactgaaacacgatatggaatgatctgagagtgtggtgttggacttctgtatacttgtgttacacattgagatgacttgctccatgaatgtatttgatggacgcaataaatccatttcaataaaatattttgtatgattttccccgttctagttcaaaataggcaatctattgtttttcaatttaatttgagaatcaaggtattgctttcaggccttataacaattcattggtagtgaatcctcttgtgctattttgcttcaaactgcatgctcgtcaacctttaacatctacttcctgtgttctcaaataacacagcactgactacttcagttcaattttgttcatataattacgcttgaatgcgcttaatggattagactacgatgaatgcaagttttgttttcttttttttttctttttgcagaaaagagaaacggtccaagttggaaaattaatagtgttaattggcagtatgttttttttaagagattggcagtatttaaaaacgggtaaatgcttgattttttttatgctgttcgcaatgctggtagagttgcttgagtatccgtcagaatatgtactatatatattcatctgaatcacagagcgcgtcaatcatatacaagagcctcctcaacatatattgatatatacagaagagctcagggaggatacgctctggcatgtggcaacgaccattgttcagtagtgtcagaagctgaacattgccgttctctaaccacgtagaaaaaataacacggcctgaacattttttatctccatatcctggccatccaaataatcttatatacggatgtctaattatctaggaaattatctatggcctaagtactgttgcgcagacgaacaagcttcatgccccaactccgatgaacttcaactgtttacaaagaaaaaaaaatgtcaggtgcatcaaagaatgactttcacttatctgaaagtatggaatctttcttctttcaaaaaaaaaccctgaattttatttatctattattattattattattattttctttttgagatgatgaaagtctgaaatcttcagctaagcgaggtttgataagcaacttacaaggttgttcttgggctccctccaatagaaaccatggatgaaaatgggcaggatgttgcatgccactagcacgtagatcatcagcgcgtgcttacccatccactccatggggatggtaagtttcctgaatccatacacgtccacctgaaggtttcacagggttttttccaatgttcagaaatagtgacaggttgcatggcattcgcatatgttttcttgggtctaattcagaggactaaccagtgtgtagatcccagcaaaaagaagccctgcagcaccagaggtagccaaggcgtaacttatcgtgtacagcggcttgttcatacgaatccctgaaaaagaatcatggaatgttctgatcaatctcatgttattaggatttaggaagaaggtacatgatgcaggttactgtctagtaagctcttaccaatgaagtccattgagaaggccagtgctaacatgctgaaggaaggaattagccaatttattatccttcccttgtgtttctacagatcaatttaaaaaagaacataaattgagaatatttcctctatgataagaaatatacagatgtagtcacaaaacaagtgttatacctcaaaatgtataattatatgtccaaactgcagcccaatcaagcatgtgacaattgccataacagagctgataaacgaacaaaaaacagacttgtcagaatttacagtaaacaagcacttggaagagctggcattccaagatgagctttcaggcaatgatgatgaatggttagtgaactgacctgaggaggccttcaggatcaaatggagcctgacaccatgatggagcatcaggtggaaggggcccattttgcggatagtttatactacattgctgcaacaagaaaagcaaaacatagattgaaaaattgaaaataggaagaaagaaacaattctctgacagaccttgcatcatactatagtacctttgtacgcgcataaaccggtcgtctgtagagatgatcgatccccaagattgtacggtcaagcattccaacggcattgcaagctggaccagtgtctcctcttactccacatctcacctgataaatccaatgaaacatgaagctctatgctttgcagagtgtactgaatatgttaagcagaagaccgaagagcagtaacacttacagagaatgatttctctgtggaaccaggacctgatatctggtattcccagtctggaacgtagacaccgtttaaaataacagtatacatggttgacaggagcaatgctacaaccctagcagaacaatgaataacaatgtcaggatttaggaatactagtactaaaaaaccacatatactgtatgtaagctgttctctcttagttactactagagcaactgaacaagtacaacaagtactactagtcaggatttaggagtagaagaaaggaatgtcaggtcaatatcacaagaaaataaactagagcacagctaacttggtcaatgatctatgacctggtaatattgatttatgtattgttataaccagtattagtcatgggcaaacacttataatgtggatgattcgaactcacaattggtaacggtatctccgtatcacatcgagtccacaatctacatcatcatctcccttgagccaaatttcacagattgcagccaaaagataagctatagcaattctctacaacatcataaaattatccaaaatgacttgggtttttctttgtcacttgtcagacaaaacagaagtagatatactgttagatacaaaatatatatcctggatagtccagagagatatacctgaagtatacccatcaaccgtatttttgtaatatcaacaccaaaagtgagactgcggacaccatggaaaaaaccgcctgtaaagatgaaaaacataatatttgtgaagaagaaaaacatagtatttgtaaccagaagaatataaagccaaagttgatctcttcatggcaatgcaaagatcatttctccaattttccttttttttcccatttaaaataaatgcactatcatttaataccttggagaacaaggccaaggcagaacaacttgagggcacgtagtacagccttcttagtagcctccaatttgtccggcaccctctgcacaaagtagcacaattacgatctagtttcggctcagaagaagaaaaacattacgacattgaccacgtcactgacgtcagtggttcataccttgtacgcgagcgttagagagatcccaaccatgaaaaggaagaatggcatgacgaaatctgcaatggttacgccgtcccatggagagtggttcagtgctgggagaaaagctccagcatcatcgacaatgatcataagctgcatcaggcaaaataatcatgggatgttataccttacaagaaaaaaacacatttcttaaattcatttaaaaaaattcccccttgtacaacaccacgatcgtaagtgattagctatcaatgcttccgtgataacaatttacagtccagtgatttttgtgtgtgtgatttttttagataatgttgtgtgtgtgattagaagagcgggaaactgttttaacagctcgagtggatatccaaccgtttattgcatgtcatctaaatgatttaaaaaaaaaataaaaaaatatgaataagatagatcaatatgtaatgtatcaatccacaaacatgcaagttaaaattcaatcttccttataaacagaaatgaaacgttttgaaaatacacaactcccaaagtcccaacgcaatctcaaaccaaaggagcgaagcgaatcaagcgatgccgatggcgacatgtccaggacggcatcggattccatggccaggccccagttttcaccgctattttacctggaagagccacacgaatattttcagtattttgtcactggacggactacggaccagcactgcccggcagagacgttcttggattcccggcctggttcattcaggcccctctgccctggccatcgaccagagcgaaaatgacatgagcaccagagcgaccagttcttgccattgataaaatcaaggcgaaattcgaaacgggttttttccagataaatcagagatgaatttgtagccactgtaaacagcttcaccaaccggcagagaagccggttcttgaaggtgagcactgaaggatttgctcaacatctgtttggcgagataatttcatgtcacttttcggtgaccatatgtatgatgatgtctttgaagccaaccttctgaccaaaaccgtcactgactcttccaaaccaagcaaagatttttcacagccattgaaaggacgatgaaggtgaaagccaaggcgcagctgaaagttcagagactgggacgggacggaaaccgtgtgcaggggtcagcaaatgtacctagccgtacaagtatccatcagtaattttcaagctaatcttgactcagccgtgtggttacaggtcttcctcctgtctcagctccagcaagcacgacacaggaagtgtcgcttttttacactcgcttttttctgaagttttcttctccttgaggcctttgcccattcagcgcgtttatttgacctcgagtcgtcgacgcaggccactgcagctgacaaatacccaaagctggaacaggaggtacagtactgtactggtactagtgtactgcccagacacatgtataaattgattgcttagctaggcttgccattaaattggctgtcaatttcgcaatttatttggggagtattgattgtagaaccaggtctaagagacaggctgcattgaaatcgtagttggggtgttaacgtcttccagtcggctaatgtctgcaacgtgcagcagcttaccagttctcatggatgcagcacacatcctagatttttgggtgtcttttcttcttttccttttattcgttgagtttgacatcttgggcactagtgctagtagcatttgattcttctactaaaacattatatatatttgacatcttcacagccacgggagtgcaatggcaaaatggacaggataagatgcattttagatcaaataaagttggtggttcttgactgcatgtgtgacaggttactggacctaatgtccatggactcgaaattcagggaatcagattgcacttagcagatcaaatactcttttggtgaccaggtgtcttccgtttcgtgtctagctacagtttagcaaaggcaacacgacatagataacccattcgatctctcggtgcttgacacgacagtcatcaagaacaaaagaagcaatcagtacagcaaaagccaaaaaaagaggaggtgtcgcaatgcgcctcacagcaatggtcatctcacaaataattaagggaagagctttctgttaaagccgtgttaattatgaaccggccacatcacgcacgtcatgccccagcaggatcaagttgctggtgcgatgcccatttggctccaagccacaaacctcagaaaataccaatgcttatagctttgatccaaggaagcaacagagaaaaagcagatctactgatgataagattcttaaccccatacgttgcatcccctttaatttatttaattattgagtatcttatggtcatgcagttaccaatgttgcataaagtcgctagggataaccggtttttcatctggctgcgggtcaagattgaaagactttttacgatgcttaattagagagagagagacagagagagagagatcacatttttaatggtacgagatgtatcagaaatattttaatataaaaaaatactgagataacttagagtactttttcaagaaccataaaaaggggtcttctatatgcaatgcaaaaagggttgtgatccggagctcttctaggctaagaaaccattttgtaagggagatgtcttgtctaagacgtgtacataaacatgctgcaaccggggtagcttttggccggtgtggaggcctcgtccgcttgccgcgcttgtcggccaagaaaagcaaagcaaaaccgaagcaatgttagagagagagagagagagaaagaagaccaaatagagcaatcaggctgcagcaatcgtgaagctgatgcagcgacggctgcgtgacaaatggtcccgccgcgcgagctcgatccagtcaaacataagctactaagcatcactcacagaatcactcgcaggtgcctaaaaatttgtcctcaaaattctgttttaaaattgctaattagattttttttaagtgtgaatagattcctcactacaatagatataaaaaaaattacttcaataataaaaggtagtagctactaacagaaacagaaattgctttcacctctggtgaacgatcgtcctctttcttgcgaagggattctccacgtgtcatcctctctctccctcctctcatgtttattgggagccagaacactccttcactcatggagagcaagaaggatagaaaaggggatttcaaatttttttgaatctaaccaggaaactattggagacaatttcctaaaaggaaaaaaaaacaaaattttgaaattgagggatatattaggtatctgttgatgatgctctgaacctgtttaaaggacgatcttttattcagcgaccgcagcaatgtaaactaatatcttcagtttttttttctttttcgatacgttttaagctgtttggcaaatgggattgaaaatggatatatcctaatatatacaatcgtacctatccatttttttgtccacctaattttatctaaacgatacgttcatttttatttttctattccatatctcgcataatccatttgtcaaatacaggccatgaaggtaataaaagctaaagctgttgctatctacatttatatatattcgttacgtgactgcaccgaccggcgagacggagcgacacacatggcggccgcacgtgtaaagggcgacgacgaaattgcatctgcccgccggcgaaaggccggtgcgcgcgccgctcgtcgatccggtcggccagcccgcgtgatgatcaggtgcatgccatgcgacgccgagaaagaatatgtgcctccctgagatattccttcttgtttgtttcgctgcacgattcctttgtcccacgaattccgatcgagcgcatgataagttggaatttcgttcagctaccacaggaattcaaatcagaagatttgccaatgtgggcctaaattcgattattgtgagtagtgcctctaccatagctctgtttagatctagagggcagccctctatttaaaagtattaaacgtataaattactgacaaaacccattccacaacccttgggctaatttgcgagacgaatctaatgagcctaattaatccatgatttgctaccgtaatcatccgctaataatggattaatatacctcattagtttcatcttgcgaattagcccaagggttatggaatatgttttgtcaatatctacatttaatactcctatgtagaggccagtttaatctattatctaaaaaacatttaatacttctaaatagcaagatacatttaatactcctttgttaggccttttaataattatccctccgaactaaacagggcccatatctatcagtagttgaaattgtcaaatcacacgtgattatttggtttctccctgtaggatacattggacattacctttcttttatgcacgcacttctcgaattgttaaacgatataatttttgcttgaaaaactatagaaaagtaatttttaaatcaaattaatctacttgtaaaatttttaacttatagtacttaatttgttatgcactaacaagctatatcgcttttcgtaggaggaaatgaattatgaatcagcactatcgaataactcgcagttagtgagagccatatctagttgtaaaccaaagcctaacaaaggtgatttcaaaaaaaaaaaaaaggcctaacaaaggggtacctcctactctctcaggtggctggcctagtggcctctgtacagaacagtcaatttgattttgaaaggttcatgctctggcataattggcagtggttggcatatggattggtgaactagaaccgacctaataccttccccccaacacagcaacataaaccagttctcgtggtgcagaatgactctaattgcaaattataatttgcaagtttgcaactcaaggtacgtgcacgcggaacgcttacgtcacctcaccgaagtggacatccatagtggctagctgcattgccttcatctacagttaatgcgcgattgctgcctataatgagctggtaattaagctcgtgctcattagaaggggtgtattccgatctgatccaggttggctcaagaagattgatccatggagatattaatgcacgattgcggcttttgatatttgtactccctctgttctttttcatatatttagggatggaggtagtaaagatgcaaattaacagagaagaaataattaaacacaaagtcaagcctaaaaggaatactaaattattcccttctcctttcctcccctgatcatacctaaattaaaggaatacgacattattcccttcctttcctccactgatcatacatgtttgtcctatatgacaatatattcgagctcgcatatggccctacgaacgagaggcaggcaggcaccagctagccacgggtacacagtcctttggacacggggagattaattggctgctgtgtacttacctcaaatctaaataaacaaagacaaagagaggacgatccgtgggagcgttaacgctgcagttgcagtcttgcagtacgtactatactaaatataaatggctaattatagtgatcttgcaagcatgtactccctccgtcccaaaaaaaaaagacaaaccctgggtttctgtgtctaactttgattgtccgtctttatgaaatttttttataattcgtatttttattgttgttagatgataaaacatgattaatattttatgcgtgacttgtatttttaatttttttataattttttcaaataaaacggatggtcaaacgttggacatgaaaaccaaggtttgtctttttttttgggacggagggagtatgctgtgctggtacagaaaaatgtccgtgcatgcatgccgtctttgctccactaaactacagtactttctctatttcataatataagactttctaacattggccacattcatatatatgttaatgaatctagacatatgtgtgtgactagattcattaacatttatatgaatgtgaacaatcctataaagtcttatattatgaaacggagggagtaacaagcaattgtacacaatcagaaaatctccgtgagttcctcttcactaaaccccgtctgtttaaggacatttggccgatttccgctgctccgtccgtctcacaaatattatcgttctaggttaattatttatcaagggttgagtaaaaaacaatagtttctcttattaaatgatggaaaagaaactatagtgctatttattagtaaatgatgtgttgctagatggtcctatgagtatgcatgtatatatatatatatatgtcacgtttccatattggagggaaaatcagtgctgtgatgatggattagtttaagcagccagcactggttattttctgtggccaaattgacccctgactaggatacctcaccttagtttcttcagggccactggtctctagttcatgactattactagctatatttaatcaaacttcctaagacttggtcttgactcctcttttttggaggcaaagctagctattatcacttctagtggaaaacaaagagaaacaacaactaacaaccaaggaaaaaaaagagaaaagttcatgcacaaggcaacacaacaaccaaaaaaaaagctcagttcatgcacactgtgtcgatcagtagatcatcatggaaggagggaagaaaacgaaattagccggaggtggagggcagcaacagagaggaatcatgggggcacacgcgcgagacagttcacggatcacggatcgatttggttggccgcgcgcaatcgatcgtggagatggacagggaaagcgcagcgaacgccaatgcgatcgatcgagcgccgaatcaaatcaaacagcgaaaggaaaacaaatatgttctcggctggggatttgtgtttgtggtgtacgtaccagcacggtgatcccgcggaagacgtcgagggagacgagccgctgccgcgcgccgccctgcgacggcggcgatgacggaggccgggacttggccgagacgccgccgccgttgcagctgccgctgccgccgagctcgagatctggcgggccggccgccgcggcgtcgtcgctcctgacgagctcgtacccgcccatggcgcccgccgccgtcctcctctgcctgcacgaccacgccgccgacgcgccgccgggcaatgcccctgcattactcccatccatcgcgcgcgcgcgtcagtttacgatcgaccgagatgatgcggagaaccgagaagcgaacggactcggatcgtttcgatcggttgcctttacctgatccggctactgggtcgtcttcctcccggactctgatccggccggctcgctccccaaatgtaaccgactctcctgatgaaaaactattgtgatattatcctctcaatttatctggtgcgcttgttgggagatgggatgaactgggggattagtctagatttgccgccgttgtagacgcctttcggtttcggctgcacgcagctagaccgagctgatggtggtatatatagtggttactactggcccgctcttctctctgttatactattcgtcttcttgtcttagcacttcttaatttctcatgttcttattagggacccttcttaatattacttcctccatctactatgtctagattccaaaatagaatcacgatgtacagattcataatattagaatagaatgtcatttgatcatcttagataagatatattctactactatgatgtctaagttcgtagttataagatttgtcttatatagtactactatgatcctatattgatatatttttttagaaacacggtacagatacaacgctcataatacgcgcacacttacctagttaagtaatattttttacgtagatttgaccaatcgttttgttaaaaaagttatataaacatataaatcagacttaaaataaaccataataaaataaataagaaatatattttttataaaaaactaagatgtataataaatcgtacgtagttaatcgtgtgtccagagaaagaaccaattcttctcactctcgttgttcgtttcagtatttgtggtagcaaaaaggggtgtgttgccatcgcatcgctcgctcgcttgcttgctcgctgcgaactcgcgccatcataccgttttgctgcgtattagccactgtctttccgtgatgccctttttattagtgccctccgaattgtactgttggctttacttgctctgggtctgctccgcctcactactctgccgtgccttctgtgtaagatgagaagaaacgtgacaaaagtcttttttgagagctaagattctgagaaacagctagtgagaatttagagaagcgaaacccatattctagcttccagttcattttctgaattctacaattacaatttatcaaaatgtaaatgaaaatctagattatttgagaagtttatgacagttgcagcttcttaaaaaaaattctccagctgtcaaaaactctataaaatgtcaacatgaatcggatgctgctttagccacggtgacaccatatttcccaattaaaaagggaagaagatactacttacttttgtcatgcatggacatcagtatttcgccccgagcattgcggtttgtatgcgacacgctagttttcgatacgttcgtcgcctctggtcacgagcgaagagtgtggttatggaggtgacacggtatcaaagttgtgatttggcccctatcatttgcgctctaatatgcctgtggaatctgaggaatatagcgcacccaaattattctcgcatggacagttttcgcgtgacaaaccaagatatttatggagatgatgttcagagagtgttctctcgtatcacaagtcatgtgtgtgtaattttatctactccaatgtgtagttacatcaactttggaaacatgttagtaataaatacaaaacacatataataattaaaaacaatgtgtaaaaattatatgtgtgttgacgaaaaaatcgaacgcaccggcctgggagatctgcttagctcctgtgcaggtccaaatattgacgagatacgggcgtgccagtcagtttgatcctgcaactgacaagatatacaaatagtatatcaaaacagccgatcggctgacaagccgatggagtagttccagtcgatagccaataatagctaatgccgataccagccgatagcgatagggtttaaacaatcggctatatatccaatgtagataatgatataaatgcaatcggctgatgaccatgtaatgaaataacaatataatccagtataaaccaatcggctagcaatgatatgataaataagcatcgatccaaagatcaaagcacacatcggctggaggtccgatgtcatgaaatccacaagattagattaaacagtgaagcctttgttgtcatcggctaaatccaacttatatgtatatgcaatccttatgagccgatgcaacgtccagataactcaccggctgaaaccccgatgaaacccttattggcaatcaataagcaggctagagattatggttctaagcacgacttagtagatcaaacttaactagtgcagcactaagtatgaaaagaaacataatacctagacaatcaaaccttcgactgattttcagggtgctagatgcctaggctaatctaatttagcaacgcgatttagccgataccggcagaaaccctaaagcgagagacagccgatagagctaaattgatatgctaagactagattaacagagacatgataaataggtaggcaaatatatcatccaaaccagagcaatccaagaggtcgaatgtactgatgcagccttgaacgacgccgatgtaaatgagacaattgcctgggccgacggaacattggacttaccccttcgccagagatcgaagacgatgcagccccgcgttaggtgccaagttccgccagacgataaaataaagtaaaaaaggtaaaaggtggcgatgcgccgaattgtattgatcgtggagattgattacaatgaccccgggtgtacatatttatacccatagggagacactagtccttgtcggataagaaagaaactaaaaaggaaaagataaagtccttatcggacactaaacacactttcctaaagataaaaggaaactaacaaactatgcataattaatagataactgtcatgtcgcatccttcttgaactcgaactcttctagataaacttcctttgattgatccgactccaccaagaacacgacacgtggcgacttgactcccatcggctgattctagaactttgaagccgatactgactctaaaccgatggtaactttgagcttaccaaatttcactattaacaatgtgtgacgaatataggtaatactgtccttactccttaggagatgggctcctccttgcttatgtttcagctcaccatgaacctccctcccgcccaattcgctaatcttggaaaaagtccaatgtgactccctcttatataggtcaacaggtcggagctgataccttcaaccaccaaacaatgtaaatcaactcctccaacttttaaaaccgtgcaaaaaaaatctcttggttgttttaagcgtggttttcgttgatgtggtgtccacgtggcacattgaccaagttttcatcaacgcagaacttacgtgaatcactatcaggggaaaaaaagctaaatgggactcaaatatcatcggtaatttcaccaaaaaataaataagtggacaccacaatgtcagtcacaaggtggagcccacatgtcatcctccctctccatcccttctttttccttcctccctccttcctcctccactagttggttgggcggcacgaggtcatcgaacttggagtcggtgctaggaaggcattggcgtccaaacccaggtagaggaaagcgcccaataaggtgacatccctaaggacgggagacgggcagcagggccagcgcccagtgacgtccatggaaaagagcagaggtgggaactcaaggtagcatggactcatcagctagcagcaaagaggaaggaggttgtggactcgttgcaatggtggtcgtggcatagtcgaggcccgctccacccagatctagccaccacattggttgctatatttcatcacatcggagccaataaacgcgcccgcaataaagagcaagcgcaccgagactgaccccaacgataagttcatccaggcgccgccaccgtcgctagccacactgcgccttgctcctagcccattcttcctagctccgtccttcaatctatcgaccgtcgtcctctaattcgagctcgtcacatgtgcccctctgctcattttggggaaaagagaggaagaaaggaggagaaaagtaagagaaaagaaagaaggaggagaagctgacatgtatgtcctacatactaactcgaccggttggactaagtcaacgagctacattagtgaaaactattttcaaaggagtcgagggagtcattttctatcagtttcaggctgtgttcattagttctagttcccagccccctccgccttattttccgtgcgcacgcttctcaaactgctaaacggtgtgctttttgtaaaatgtttttatacgaaagttgcttaaaaaatcatattgatccattttttttaaaaaaaaagctaatacttaattaatcacacgctaatgtatcgctccgttttccatgcgcatccggatgggaacctccagtatcgaatagagccttaatagttgagggatcgatatattcagttttgcggttgaggaatacgtatctgattggacctgtatttgagagaatctccatagactttttgcgctaacctttggttcctatttcggtgggcctccataccagcccatctacggggaaaaggattttccggcccataaaaatgatgagccagagttggggccatccgaggcaggaggccatctaggcttatccatcgccagtaggcctggatccaatccaggcatgcatgcaaccagcctggtggtcgtaggctgcatatgggccaagcccaattatttggattaggccacaagggatgtgacaagtgtgtgtctagactatggagacttaaataattccactcaagatctttcattagctggagatacaaaaaaatatctccgagaaaaatagactagatgaaagaggagcaatgtgttgagtgaaattgggaggaaaaggttgggctaactcctaggagtaagacagattgagtggccatgcattttttttcttgggtcctgtttagttctaaaatttttttttctaaacttctaacttttcatcacatcaaatattttatacacacacaatttttcagtcacatcgttttaatttcaattaaatttttaaacttcagtgtgaactaacaaagcacgcacacggtgcgttgaaacctccaaatagaaaaggaaaacagtgcgtctgccatcggaatatcgagatacaacaaatcgtgtagggaaagaactggcacttggatctctttcgacttcgtccgcacgccattgcatgtgaagctaagctctagctactagcttactccggtcgctttgttgcgttgcgtgtgcaaccgcgccgcgcgtgcttgccatcgcgatctggtccggtcgagtactggccaacgaaattaacctcctcgaccgtatgccatagtggaccgagtggagtagtactagtacctctctacactcttttgtttctttccttcttttctttttaatttgagagagatgactagcagtactaatcaaacagtcaaagcatatgcattggttctgcactcaatgcgcatatactaagggcccgtttagctccccaaaattttttcccaaaaacatcacatcgaatctttagacacatacatgaagcattaaatatagataaaaagaaaaactaatttcacagttatgggagaaatcgtgaaacgaatcttttaagcctaattagtccgtgattagccataagtgctacagtaacccacatgtgctaatgacggcttaattagtctcaaaagattcgtctcgcggtttccaggcgagttctgaaattagtttttttatttgtgttcgaaaacccatttccgacatccggtcaaacgtccgatgtgacatccaaacatttccttttccccaacttaaaattggaagtttggttaaaattgaaacgatgtgactgaaaagttaaaagtttatgtgtgtaagaaagttttgatgtgatgaaaaaattctaaaatttgaaaaaaaagtttggaactaaacacggctgctcggtggcagccaacgtcaagggaaaaaaatacgtagtggaaatcgtatacatagcgcaaacatgaaaattacctttcgataaaataaaataaacatctatccacgtcatcatgagtaaaaatctcgtacgtcaattttttatataacggtagtttccaagtttttatatacgtacgtgtttttcaccacatatttctctaacatcaacaacgccaaaacaacccagacaacatttggttgaacagccgcagccatatattagccttctgaacataaccaatcatcataaccttaatcgaccgaaacataaattctataacggaattgctatatgtcttttgaatgaaatttggggacgaaatcttacagattttgaaccattagatccatgccaagattcgtgcatctacttctctcatccaacttcggcgggctccccttcttctccagcgccggcgataccccccaactccgatagggagtatacgggttagggtttggggttggggtgagggtagaaggagggttaggggaaggggaagaggggagtttccttgaggcttagagggcaacaccccccaactctgatagggagcatgcgggttagggtttggggttggggtgagggtagaaggagggttgggggaaggggaagaggggagttttcttggggcttagagggatggccatgggcagcgaaggaccggcggtgggcggtgggcttcggcgggcggcgaggcggcggcggcgccgtcgaagccgcggggatggaggagggcggtgggctggtgtcggcggtgggggcaaagcaagtgtacggttagaaggcggcgggcggtggatgcggatccggccgtggggagttgccggagacggggaagacggcggggaggggcacctcgccgtcaccgccttgaggagaaagaggggggacggaggagaggggagggggagggggctcaccggggggacctcgccagcaccgttgactctctccttccagccagtgaggcgggcggcaacacggtagggcggtggcggcgggggatcgcgcgtgggacaggaggaggatggtggcggcgtgatctgaacaggggaaggaggagaggagttaggttaagtggcctgtacaaatcttgaagcatatccaattatccaaaattcgaatgatagaaggtatgattttttgtcacaagttatatagacagccccatctatctattatctatctatttatctatcttctattatatactaaaagtccattaatcttcctataagcgcttctaagccgccatgtggcgctcctacaaacactcctaggttgtcatgtggcagtttataatcccaccatcgattttcatttaaattggtggacccattattttagaccattagattacatctattaattatttcctcttgatattctgtggatatgagtgaaactgtttacacaaaaaaaaaacttacgtacgtacactatggaaagaaacagcagaaaaacttacgtacgtattactatggaaagaaacgaaacctttcagcatacgtacgtaaatgcgatggcatcgtgtaatctcacgtgcatactgttcatttgaaaaaaaaatactcctctattttaatttataagatgttttaactttggtataagacaaacttttttaagttagaaacttaaaatatagtaatatttacgttaccaaattagttttattaaattaataattaaaaatatttttataataaatttatattgggtcaaaaaaattactattttttatatacttcgttaaacttaaaacagttacattttataacctgaaacagagagattacttacctacgataaataactattagaaaagatgatgttcacttgaaaaaatattacttacgtatgcacgagtaaaaataaaaactagaagacctaaaaaatagatgtacgtcggtataagaaaatggacggttttttaaaacaggctatcctatataagaaacaaaatttattactccacaaataaggtcatgtggcatttctacgagcactcttagactgccacatgcatgactctctataattttgctgtcaattttcatttaaaatgatggaccattattttatatcgttagattagattagcccgtttcctcttaatttcccgtgtataggaaagaaacttttttaccggatgttcgattgaaaaaaaatttacaaagaaacatagatatatacgataataaagctatataacccaaaaaatatattatcagagtaaatactacgataaaaaaaactataaaacaaaatagtcctttagatactattccctaaaaaagtacgtacggatgtatgagtaaaaataaaagctatatgaccctaaaaatgtatgtacgtcggtagaaaaaaaaatagatggtcatttttagaataggattttctatactataaaaacaaaagttattactccgcaaatatggccatgtgactaagcactcttagaatgccatgtggcactctataatttcgttgtcaattttcattcaaaatgatggacccaaaataaattattttggatcattagattagcccacttccttttaatctcctgcgtatatgagagaaaccttttaccggatattcgattgaaacaaatacaaagaaacatatgaacacacgataataaagctataaagcccaaaagttactaatataagttggtataaccatcgaaataatatagacggttttcaaaataggattttctacactataaaataaaatttattactccaaaaattaatatgcaagttaaactagatcaatctaaaaacaaattaaatgtgtttaaacacctattttttagattatttttaaattttataatcaaactttaattaggtgtattcaaatcttgataacttatcatagttatattatagtgctaaatacattacagcacatggagctgacatataataattaatatcataatactttttttaaaataaattaggcggcatataagtgatgagactgtgagaggcacgactatgtcgacccatggttgaaggcaacagataaataacatcgattgttccacccattagagggggcattcatgtctattttttaacggtgttatcctaataccaatagaagcgttagttttagaatacttattcgtagatttagacataagtgttgacgtaaatatttaggtacataattgaaatgaatgttttatgtgctaatgatgtagacttattttggcggtatagatggagttccatttattaaaaacatatctatcttttaagaacaatgataataagtaatagtgataatagaagagtttacttggacaaaagtgattttttttaaatctaagagacattcttatcatttatattaaagtctactgtctatttcacaacataaatttttgttactatgaagcaaaatctacaatatttttatacgtatatggtgaaatatgacttaattctcttagcattatttatataaacaatatataagatgcccgcgcatctgcgcgggcttcctttctagttctataaattcgctcataacttttttactaaccaagtttaatttgaaaaattcggtcattggcttagattatccaatttgaccgaataacataaacatagcgatataacgtttataatgcctaagacaaaaataaacacttcggccttatttagatggcaaaatttgcccttgcgtgtcacatcaaatatacggacacatatttgaagtattaaacataatctaataacaaaataaattacagatttcgttagaaaactgcgagacgaatttattaagcctaatcaatctattattagcaaatgtttactgtagcatcatattgttaaatcatagtacaattaggtttaaaagattcatctcatgatttatatacaaactgtgtaattgatttttttttcatatttaatactcgcatgtgtccaaacatcgagatgtgattggggaaaagtttttgttttgcgaaatacacgtccccttagtttataatgcctccctccaatcagtctctcatgcgtgttcctaatcgacgctctgtcatttgagtcatgcccggccgctgatcgtcatgatgaattgattgacggctattttttttaatcaaaacgttttggtcatttcagtcatgaccaaacattaggtcttgtttagttcgcaaaccaaaaaattttttgacgtgttacatcgaatatacgtatacatatttagagtataaaatatagactaataacaaaacaaattacaaattacagatttcgtctgaaaactgcgagacgaatttattaagcctaattaatatgtcattagcaaatgtttaccgtagcaccacattatcaaatcatggcgcaatcatgcttaaaagatctgtctcgcaatttacacgcaaactatgtaattagattttttttttcatatttaatactctatgcatatgtccaaacatttgatgtaacagggtgaaaattttttgattgggaactgaataaggccttagactaaaaggaccgaaaccgagtagatatgtcttcatttttaagtgaccgatttctataactaatataaatattcgtatttttctggtcgtcacatctaattttcgtccgtttttcgtccatacacaatcctacaatcctattcatattcagttagcaatagggatagaaaaaattgcaaaaaaaaaaacaccgccgccggaggagaagagaggcggcagagggagcgccgttgccggaactgcccgcggtggccgccacagccgacgaatacacgctcggacgtcgacgccgccgtcgacgccgacgccgacggggagagggagagggagagagggagggacggccgtcgccgccgcaccccgccgtcgctgcgccgtgccggcgagacgggaaggagagccgccgctgccaccgccgctagcgtggagaagggcgtcgccgccgctagcgtgggggaagggcggcgctgccgccgcccgctagcgtgggggaagccgccgcagccctccatcgccgccgccgcagcccgccgtcgccgcgccgtgccggcgagaagggaagggaagcgatgccggtggtgggagagacggccggttggggggagggggagaggtgggagatggggagagggagcggcgccgtcggaggaaggggaggggaagtggcgccggtggggagagggggagggggagaggcggcgccgggagtggggtgggggaggcggccgagcggcttggggaggcggggggggggaggggtggggagggttagggttaggtttttgattaggccgtgggccgaccggaagggacggaaataagtctattttaggtccctcgggccggaaataagtctatattaggtccctcgggccgaaaaaaaaaagagaagttcatttttagtgcttcattttttcagaagcatttataattatagttattgaatgtgtttatttctaagcaaacctaaaaggaaggattttctttcttttccaattaaataattattaaatgatgtttgtattattaaaattagcaattaagctctgaaaattccaataaaattccaaagagcgtaactaatcatggagtatttaataaaattaaatttaacaatgtcattttatttctcacgcttgctttacttgtaaatttatttaattatacccatacctacttaaaagtaccaaatatttcagcgaatttgtattttaattaattgcatattttttctgatctgtgcgctttccggtgcaacgcacgggcacttttactaaaccaaacaacaattttggtcaatatacacactccgtaatcacccggtgcaacacacgggcacttttgctagtttaaatgtaaaatcaaaagaacgaactgaaattttcgtccgaccaaatgcttgggtggcatttgagcactggcattttggtagagtggcaaatagtaaattctccccatcttacataatctgtcatataattagaacactcttgaaaaaagacaccacgttggaggctagaaattcctatattaatcggaaaaaaataaaaggagagtttaaatagcattacaatttagaaaataactgaaattcagaattaaaaataagcagtattacaagaagaaaccatatagaacccaatacaacataaattaaaattcgaaataaaaaataaaataaattatgaatttaaaaaagaaaaaagcgagttaacgtaagaatacaatttataaataactgcaattcgaaattaagataagcaatattagaataagaacctatatagaacgcaatacaaaattaactaaaattttaaaaaaaaaataaaaaaaagatagttcaattttgaaataacaaaaattaaaaatagaaaaaggaatattgaaataactgtccatctataacactgcactttattaattaaaattaggaataaaaataaaacaagttccaaaattagaaaatgagagtttaagtaagaatacaatttaaaaataatagaaatttgaaatttaaaataaggaatattgaaataatagctcatataaaaccaatacgagattaactaaaattaaaaaaataaatgaaatttagaaattataaaaaaaaggaaataaaatgtttttaatacaatttagaattaaatggaattcaaaatagaaataaggaataatgaaaaataatccatctagaacataacacgagattaattaaaatttagaataaacaatagattcagaagttagaaaagtaaaaaataagagttcagtaggaatacaatttagaaataactaaaattagaggaataaaaaggaatattaaaaagagagatcatctataatactataacacaacacgagattaattaaaatttaaaataaaaaaaataaaataattccataaattagaaaattagaattgagtgttcaagtaggaacaattgaaaatagctgaaatttataatgaaatcataaacgattaaatcaatagtccatgtagaatataacacaagattaattaaaattttaaataaaaaataaaataaattctgaaactagaaaaaaaagcttttaagtagaaacgtagtctaaaaataataaaaagttgaaataaaaaataataaatatttgaaagcagctcatctagaatacatcagtcgcagataccaccaaaaagagaatgggtagtgagcgagccgtaaaagagtagtattgtggcggttgatggaacatctaaaaactataaataaaaccccctcaatgacgattaggtttgattttaagaatactaatgatgattaagaggaaaggcggagggtaggccgtgaagcactagggtcatggaggttgtcgggactgtaaaaagtaaaaatgaaaaaaaaaagaagaacccaacgtcgatcaggttcaatttttacaatcgcaataacaataaagaggaaggtagcgtgttttgacatgacttttaaaaacaataaaaaagaaacccaacaagacaataaactctaaaagttataagatacgattttcaaaggtcctagggagaatgaatagaacccgtgacatgccggataagtaaataaagggacgaccaagaaataagaggtcgattggtgtggttttttaggaactaatcgtgcccgaggaaaattagtaggcgcaaaatagcgtgctttgagtaaaaaagtgtttataacacttccattagacaacattaatctatagatcattccttctaaatggaaaccctcccaaaaaaagtgtttcttctgattgcatcgcacggaccaaacacaatacgatgatggtggaatccagcaaggaggcggtggtggtttgcatcatcgtgtattcttgttaggtattacagcggtgattatcgaccgatgctgccgcctggagctcaggccacctattttggtcgcctggacgaggttaattacacgcctgaggtggatcaggccaggcgggtggaaagggccctcagggcagcaaccaaacaagctcttaaaagcctggaaacccgatattcaatttcttttaatatgctataagatgacgaaatgactgtttaacaatttttgaaaaaaaacatatgtataaaaactttaataactttatatgtgtgctagccgcacaattgcatggttcatccagctagttttgtttgagaagtaaagatatgccacgcaaatgctctcttaatacactgtctaggaattctaattaattaacgtgtcatttgaaacacaaatatctgtggcgtttaaaatggctaagggggtgtttagatggggctaaaactttttagcccatgtcacatcggatgtttggacgctaatttggagtattaaacatagactagtaaaaaaactaattttataaatgagagctaatccgcgagacgaattttttaagcctaattaatccataattatcaaaagtttactgtaacatcacattgtcaaaatcatggcgtaattagactcaaaagattcgtcttgcgaattagtccaaggttatggaatgggttttgtaattagtgtatgtttaatactctaaattagtgtctaaacatccgatatgacagggacttgaaataagtccctagaaaccaaacaggccttaagatatcttcatgcatggtttacaatttagtaccagtagtactgctatactctactacttacctaggcagctggtataggtattaggtgcttgcacacctggattagttcagaagtcggttcctggcactttggcactttgcggcggatctgtggagactacagtgagagaatccaatacgtacgctacctagactgccctctacggatgagattccctaaaagagcacaagcaaaacgctgtaatctgtaagcaccacgcacgcagcatgcatggctaacaaagcacacaaaaacctcgttggaaagagccaaattgtcgtaccaacacggcatatgctcgtcagctcgtacgtgcgtacccaccttgggcgccttctctagctcccggtgccagacaaacacggtggaaaactggaactgtatgtggttttcacacccgtgacacgtgtagcgtaggtgtagccggccggtgaagaaacttccggtctgtgcacacacgcgcgcggctagcaggcaggccgggttccgttcggttcgcgatgcgtcggccggccacgtcgcgcggcgcggaagcgccgtgacacatgcgccgacgtgagcgatcgatcggcgggtagtacgtcgcactggggaagctgctcacgtggacggaatgggcgcagctgctgacctgacaccaccacggggccccgcgcccgcgaaacgttgccgatatatactagaagagaagtcccccgcgcgacgtcgacaagtcgacaagtgcgaggagctagccatgtgggtcgtgcccgcgcgcgccacggcacggcaaccccggaaacggccgaaacagcggccaacgccaaaagtccaaacctcccccgcgccgcggccgccgatcatcagagcccgccgacggccgcgatcgcgcagaccgcgcacggcgtggcggggggaatcgtcgcagtcggacggagcgccacgccttttgaccgcgcggtgtgggggggtgggtggtggcgtacggcggtagccggcgcggtagaaccgatcgatcgatcgatccccccacgcagataaaaccaaacccccgatccctttctaccgtcccaaactccccatttccaacgtgaattcctcaccctccttccttccttgcgtgtttccttcgccttccgcccggtatttcttataccccccctcgtccaacccggcgctattcaattcaccgatttcgttcgttcacccaccacaactcctccagcgagtcggggactcggggtagatcgtagaaatacggagtatacatacgtacaccgctacatttctagattacagtatttacagatacgtgggcaacgtgatcacgcagcttattagcatttgttaagtgcgtagttcgttcgttcgttgattgattgtgttgaattaattgagaggggctaaagatagtagtagtggttggttggtgcggttgcggcgggtgatcgaacgatggaggtgtgctgctgctcgacgtcatcggccgtgcccgggaggaggttcgcggcggccggggcggcggcggcggcggtggcggcgaggtggggcgccgtgggggtcgggagggcggtggtgctggcgcacccgctgcgcccggcgccgcgcggcgggcacgcgcacgcgcagcaggcgggcgcgcggcgggcgcggcgcgcggtcgtcagggcggtgttcgagcggttcacggagcgggcggtgaaggcggtggtgctgtcgcagcgggaggccaaggggctcggggagggcgccgtggcgccgcgccacctgctgctggggctcatcgccgaggaccggtcggcgggcgggttcctctcgtcggggatcaacatcgagcgcgcgcgcgaggagtgccgcggcatcggcgccagggacttgacccccggcgcgccgtcgccgtccggctccgggctggaaatggacatacccttctccggcagctgcaagcgggtgttcgaggtcgccgtggagttctcccggaacatgggctgcagcttcatctccccggagcacctcgccctcgcgctcttcaccctcgacgatcccaccaccaacagcctcctcaggaggtaggtagctgttaaactgcttagcttactattatatccgctttgattctgttaggaaatttttattgctgctgttcattatcacctcaatttctcatccgatccactctgatgccacttgtctcttgtaagcacaacgacaatcactccaattgtttgtttgttcctcataagaaacacacaccattttgtcatctgatagtaatataaccttttagctagtttagaaaaagtccatggataatccatcaccaatcagtgttttaatgctataccgaaagtttaagttggtacagagaggatctaatgaatgtaactcactgtacttatggaaacaatatgatggaatcattttaccatgataatttgttaccctgtccttttcaccgtctgtgccaacataaatagatcttgttatttgttgcagcttgggagcggatccgagtcaactagcatcagtagcgcttacccgactccaagcggagcttgcgaaagattgcagagaacctgcaggagcatcatctttcaaagtacccaagaaatctcctgctggagctggaagatctgccttctcgaaatctttaaattcaaagaaaggtcaggaagctgctgtttattgaagctcatatgcatgattgttgatggtattggctaaggaagttgaatgcaactttgtcatgtttgccatttcagaaaagggtgcgcttgatcaattttgtttagatctgaccacacaagctagtggcgggtttattgatcctatcattggccgtgaggaggagattgaaagagtagttcagataatatgccgacggacaaagaacaatcctattcttttgggtgaggcaggtgttggcaaaactgcaatcgctgaagggttggctcttcgaattgcaaatggagatgtccccatttaccttgtggtaagcttgaattgcaaatgatggatgatacaagaaaattcgttttgtaaaattcagctttacaacaatagtattctcagttctcacatttaaaattaccacacaggcaaagcgtataatgtcattggacgttggtctacttattgctggtgcaaaagaaagaggtgaactggagtccagggttactagtttaattcgtgaagtccgggaagcaggtcagctagtaatgctatctgaatgttaaatcatacataaggctttctggatttgatcttgacattcaaggttgcctccaaatttggtgcaggggatgttattcttttcattgatgaggttcacaatcttattggatctggcactgttggaaagggtaagggtgctggccttgacattggcaacttgctgaagcccccacttgctagaggtgaattgcaggtattacatttatcatgtttcttactacacgctcttgttctatgtaggaaagaaagaacatctttcttaacaaccatatttcttatcttataggcaatatttctttttatttttagtgcattgcagctacaactctagatgaacacagaatgcattttgagaaggataaggctttggctcgccgcttccagccagtattagtagaggagcctagtcaggtattgcagatattttcataatgaagttaggtgattttacttgtacatttgtttctcaaccacaattagaacacattgcaggatgatgctgtgaagatattacttggtcttcgtgaaaaatatgaaacatatcacaaatgcaaatttaccttagaagccatcaatgcagcagtttatctgtcagcaagatatattcctgacaggcagctccctgacaaggccatcgatctgattgatgaagctggcagtagagctcgaatggaatcatttaataggaagaaagaagggcagtcttcaatcctcttaaagtcgccagatgaatactggcaagagataagagctgctcaaaacatgcatgaagtggtaatggggcatttcctacttgttatatgatgattttgtttggtccatcatcaggtgttaaatatataacctgttctgtcctaaattactcaggtgtcatcaaaccagatgaagtattcccctcgtcaagagaatggcagtgctgccattaaagcaccaagcgaggacatgaatgagttgacatctgaactccaagttgaggagtaagttttctcatgacaacatgtgcactataatctccattatctgtcctctcacaatggaactttattggaataatgcagaccaattgtagttggaacagaggaaattgcaagagttgcctcattgtggtcagggataccagtccagcagttaactgctgatgatagaaagcttctcgtaggactagatggtgaactcagaaagcgtgtgattggtcaagatgatgctgttatggcaatatctagagcggtgaagagatcacgtgttggcctcaatgatcctgacagacctattgccactctacttttctgtggtccgacaggagttggtaaaactgagcttactaaagctctagcagctagttattttggatcggtaagtcattctatccatgttgtgatctggttattttgacacatttgcatatgattcatagaatgtggcttgacaagggttttttctggtaaacaggaatctgctatgcttagattagacatgagcgagtatatggagaggcacactgtgagcaagctcataggctctcctccagggtacatcggatatggtgaaactggtactctgacagaagctgtcaggagaaagccatttactgtagtattacttgatgagatagagaaagctcaccctgatattttcaacattcttctccaaatttttgaagatgggcatctgtcggactcacaggtactacatcagtagattctgatatgcaactgctttgttacatgtccattagtaagtttcaaatagtagagttacatggacaattttttgcaatgttctatccctagaaagtaaactaaaaaatggttctgcatttatatttctcattgttttcggatgaaatttaaagtagttcataatcatatgccgaatatgttttatttacgttagagctttgtgtggactacagggccgcagagtgtccttcaagaacacattgattgtcatgacatcaaatattggttctacatcaatttcaaagggaagacgaagcatgggtttcatgacagaagatactgaatcaagctcatatgttgcaatgaaatctctagtaatggaagagttgaaggcatttttccgtccagaattgctcaacagaatcgatgagatggttgtattccgtcccttagagaaaactcaggttagtttcttactcttggccctgaatttcttaaaaaaatcttacatatgcttagtcaacttatataataataactccgttagtcagttactataaatacctgataaaatattttatttagctatgcaactagttagacacacaactaaagtgacataattgtcaatgctaattcctattctgcagcttctgatcagatgagaaactaatgccccatttacatgattgcagatgctagcaattcttgatatcatcctacaagaagtgaagggtaggctgttagcccttggaataggcctcgaggtgtccgatgcaatgaaggacctgatttgcgaagaaggctatgacaagagctacggtgcgcggccactgaggagagccgtcacccacctgattgaggatgtgatcagcgaagcaattctatttggcgaatacaagcctggggacacgatactgatggatattgatgccggggggaaactttgcatgagccacctgaatgagaaggttgtccagttgtctgatccgacacggacattctgaagttctgcatactgcttagtacattagagatctaatttttcattctttcgagattactaattctttttttaggtagacacggaatatatttcattatgtacataacagttaagggattcgttcgggcatataaatgtcttaaaacttgtacccaactgtatattgttgttcaattgatcaaatatattattttgaaaccatagttgcggaatgttatcgttgattcgtcattaattttctgttctgtgtattcacgaaacaagacttattttaatggagtaggttacaaggatacttcctccgttcctaaatataagagattttggttagatgtgatgtattctagtacaacgaatctagatatgagaccatccgtgtggtgaaattatacaaaccacaacctaagttatatgtgaaaactgaaaagaacatacgcggaggtgctattgaaatccttgaatatacgtacatataaaacttcactatctagctcaaattcatttcgaagatatgaaatctacgaccattagaacgtatagtataaatactacatattgaagtttcaccgtttcactctgttcatttctgtgtttctgaatttcgttccttcaaactaaatcaagttttaacatctctgtttgtgaatttcattccttgcagactaaatcaagtttgatcaaatttttgcatggttagaattggtggtctccacacaacacattcccaatctgctagatgttgctcatcctatttactaatttctcaacatcgtagaatgacacgtacaacatcccaagtttttccttgtcagttgacacaacagaatcaccgatgcctttactagacacaaaaacattttattcgccttgcaaatgatctgcctcttgaacaggatgtatacaatgtatcacaagcatgtgactaatagttgcacaaaattcaataggaagataaaaactaattaccatccaacagtaactagccccccccccccccttctctcaaaaaaaaaaaacctttatgatgaatacgttgcctaggaagcatatcataaaaaaaacaaagatggcatagcttcagataatacagtcctacgcaatccaaggagccatgagccaagggctgagaggcttcaccgtgcttttccaaactcaggatccctggaaaaaaatatataaatgacatcagacagaaatttggcctaccttgcattgggtcccaaaactagttccgtgtccttaaattttgaatataaaactatcatttaagttgaatggattggggagggacgctcacaaaccttttaatttgatcgagtatcagaagtctggggccagggggaatcttcacatctctcagagcactgaagcagcagtcaacatattagtgtggacatgtaaatttttccttcttcagaaatggtgttgattacaaacaaaaacaatgacttgcctgtcggtaaggagaggcaaagtttgatcagtgagtagacccttcttaaaattcttctcatatttctcgaggcctagtttttgcagcatgctccttgcacgggagtagtacagatcctcgctctgtggctttgagaacttctgcccaatctgaacagaatgaattaacaggtagaactagtaagctacaaggaatactggataaaacatcaaaacgtcatatcaatggttgaaggctagtgacaagataaccaaataatagtaaatttactaaaatcaaaatgtgctactaaaattatgtgtgataattccacatgcaaagatcaaggtagaaagaaaaatacttatagaacctgtacttcaacagaattgtttcatcggaatatgggtttcaaatttaaactcactataatttgctctcgcgtatcccatccaaaatcgtcaaggtcctatccaaatacttccataaacagcaaagtagcttcttttgtaccaaatctcttcacttctggaggcctaaggttaggaggtttgcatgtctagccaagctctatggatacctcaaaatggagtttgtaacaactaacaagaaagaaaaaaagtggcatggtgacactgccaaagctcattgctgtcataaatacttagtctgtttcatcatttccatacatgatagacttcaaccgacaaaataaaatgaagtatacatgcggtacccatatgaattacatactctagctacgcttaagcaagattgttagaaatatactcctatagctaggcttaagcaagattgttagaaatatactcctaaattaagcaaaacatttcaggagtcgttaatatctgccaagttatagcaggtctccacaaggaggataaaattgtatttccacaaatagtgacataccaaatcaacttcagggtacagaagatgtcaaaggttagtaataaaatggaacgagcaggaaaatgacaacaaaaaccattaaccagcaaatacatctagattcttaccatgaaaaagccaccttgaaatattgcaaaagcagcaccagttgtaattgcatttgcaactggattgggagttcccattccactaactatggagaacagagcaccagaaccaaaagcagctgccatgctacacatacagaaaagacatttttttctctagaataaagcaacgagtatgtattattaactcgaactaatagttccatccagaaatctgaatatgaacaatttatccctgtctttaatggttcatatctggaaatcgcaatcaagcatttacaagattaatttgcatatatcaaacaccaaactagttatataagttgcgttcttttaaatgtagtgccaatctagatgaaattccaagactcacctgccctggatgtcctcaccaccacgtatccttctcattacacaagatatgcctgcatttgcaccagtcataactgcaaaattccgggcttgcaccaatggtccaccagctaaagcctacaaatagatccaaccttgatgtgtaaaaattcaaatactgggagacatctgtgtggcctctaaatggccaacatgaaaaatgccaccctaaaattaagttcatgattacatagttcatgggtgagccttttaatctattgtagattactagattgtaatctcaaagtgaaatctgtgctatagctacacgcaagcttggaactagtgatcaaacaaatgaatatattttctagtacattacaaccattaatctacttcactctccattctttgttattgatgtaccgaattggctcccttcaccagcatctaattctatgccagactaaccgatctttgtgctctagaaacaatttgtagttttgtacatagaaaaacttcaaactgcaatccgggagcaatatcacgcattagcaagagagcccactctataaatggccattacgttgttaacgatattcatacagatgtatcatgatcaatcaatttagtaagccgaatctacgaaagcaagagcagattgttccagttgtgtttagattgcaatcttgatacagcacgttgtaaatcgttagtaaacatcagttttcttcacgaagaattcatcaaatgcgccaaaaggagaatcgggtagaagatgcgttggcaacctgagcctgcttgaaggacgccatggcttgcgggttcgcgttgggcggcggcggcggcggcgtcgggaacggggaacccccgtcggcggtgagcgtgcccatgaggccccccagcgccgccccctgcaccgcccccacggccgtggtcaccgcggcctcgatgtgcgtcggctgctccgccatccacttgcggaaccccgcctccagcgccttcacgcgcccgctccactcctccaccaggctcccccctcgcgccgccgccgcagacgccgacgacgacgacgccatcgccatcgtcgctcaccacaccaacctctcttctcgctgcttcgcttctcgtcgtcttcctccgatggagacgcacacgcctttatcccccctcccccccatcgaaggcttcgcttaactaggccgaggcccatttggttctgttaactaggcccattggtgtgctacctcctccgcttgtgcggagcggcgcgaggtgtccatggcggggcggtggctgcgggcggcgagggggatgggggggaggaggaggagggggtggtcggaggcgccggcgttcgcggcggagcagcgggcgacgctggtgaacgtgaagctgaagtgggtgaaggaccgggcgctcgacggggcggtgtcgcgggagcgcgacctgcgcgccgcccaccacctgctcgacgtcgtgtccgcccggccaggccaccgggtatcgcgcccggagctcctcgccgatagctctgtgcgcagggcgttcgggggcgtggacggggtggacgcgtttctagccaggtaccacacgctcttcgcgctgcgccgcggcggcggcgtgtccctcacggacgcggcgctcgacctccggcggcgggaggtggactgcctcgtcgaatccgagcccgacctcgtgtcccgcctccgccgcctcctcatgctcacgctgccgcggtcgctccccctccacaccgtcgacctcctccgctgggacctcggcctgccccgcgactaccgcgcctccatcctccgccgctaccccgaccatttcgccctcgaccagcccgagggcgatgagcgcgtctggctccgcctcctctggtgggacgacggtcttgccgtctccgagctcgagaagagcaccgctggcggcggcggcggtgacaccacttgcctccccttcccggtgagcttcacgaaagggtttggtctcagaagcaagtgcatcaactggctgaaggaatggcaggcgcttccgtacaccagcccctatgccgatccctcaggcctcgatcgccgcaccgatgtgtcggagaagaggaatgtaggagtgttccatgagctgctgcacctcacggtggcgaagaggacggagcgccgcaatgtgagcaacatgaggaagctgctcggcatgccgcagaagttcaccaaggtgttcgagcgccatccaggcattttttacctctctagagtgcttggcacgcagacagttgtgctcagggaagcttacggtggtggaagcctgctgctcgcgaagcatgcacatccacttgctactatcagggaggagtattcggcagtgatgagggcggcattgccaccaaggaggaggaggagtagggaaagtgactcgtgcagcgagcaggatgaggaatgtgtaggaggagaagaatttgaactcactgaatgaatgcttctgtgcagtgaatcaattttgagtgcactaaaatgaagaagatttagttggatcacacaatgacttgttaggcccaaaaggacttggtgaacctcatcagatggatgccctacgatgtcaatggctcagcaggtatgttcggttgcacaccttgtcaccttcatacagtaaccttgaagaaaaactgcaagatgtttagccttaagattctacattggtttagaatttctggcttcttcagtctgtcattcaaatttaatttttggtctatgttgttggcaattatgaaccaagaaataagatttgagtaccgtatactttgactgagcataacgtctcaattaatttatgttttgcatgttggcactgaaagagtgattacttattttattttccttttcaaagaaaagttgcttgaaaatttaactatttccctttcactgtttaaatttctggacaggagttcaaaccaaatcataagcatgtaacttagacttgttattttttgctacctgcatgcagtaatttgatgaagagtggctttgggacgagcagactgtatgcacattagaacttgcaaagtttgaagcatgcacatttgctgcttgggccatgtgagaattggacctcatttgtgctgctggacttgagccaagcggcaacattgcctaccagaaatgctccagtggcaccaccagcaggatttcatcatatgttacatgaaaaaatctatagcatctatctggttatttgtgttcttgttaactgtactatgtgcatatatgttcatctagtaatgaacttgtacttttattgcagctgtcttgctttgttgtgtccattcatatgtttctatgtagatagcatacacagttgcatatccatattatgcgtaaaacttattgacctagtttgtaacccaatagatagtgtgcaatttgatggtaaaatgtgtggaatcaattgttcaaactccatattccttcctacttcccggtatatgacttgcagctagtagtctcactttcaggggggttctgaagttatgacagttcataagtttattaatctaaaactaaatcgaataattcagtttccaaggatcataaacagttcattcaattaggagactctagttataacagtcctttatgtttgctaatgtgatgtaatttacaaaaacatattgttttcaatctttgtttgaactttgaactgatattttcttttcttgtaatatccatgatataatccttaccagccttactactttcttctgcatcatgttgttgctttctttcaattcttaaaacaatcaaaataaaaaggttaatgaatcaagatccaatttatattgtactgctacttagttagctcattttgtactgttcttttcataccgtctaaattctcctctccagcattataattgaaggggtatttagttggacactccaaaggtgccttgtttgaaattccaaagatcctctcttttctgagtatgtgttcgacaaaaagtacactgtattgagtttgtttaaaaggttcttgaatagatcgctttgatcgctttgactatttgcatatgaatgaaaacccaaagccatgacttgatatgtagaactcaggggttctttgtgtgatagagttatcactgatcactactccctccgtttctggttataagacgttttgactttggtcaaagtcaaactgctttaagtttgaccaagtttatagaaaaaatgagcattccaataggttcaatatatgattgcatagagccatagagtttacatagatatatcatatagccaagatatgattcatgagtaaggatcatgacacctgggaatgtcattcattcattctagtaagaagaaaatagtttaaagttaggaaagacaacagaactcgatttttcatgagacaatctggatcttcagtttaatattttattccagcagtcgtgtttaactgaaaatactcaattgaatgattggatttagtttctgggctctgaattcaataaaagactgcagtaggtagggttttgtgtgacgctcttcctagaaatgtcttcagttagtgatttactctccattctcagttgcacaatgattgtctcgtatgattaaatgcaaatactcttatgtttagcagtacaaggattatgtgtatatgcatgtcacagcaaacactagggaaaggatcagagggccctaagcctctgggatactgacaatggtggaaaaggtgaaaaccagaatggcagcatagagccagtttcaattgaatctagtatttaggctcagaccaacaaaagggcttcacaaagtaggttttcgagggtcatgctcatgtgtgacactcgaactaaaaaggctctggtagtgagaactctctacctctcaattgttgcatggttatcgtctcatatgattacttccaatgaccagttggtgactagcagtattggtctgataattgattattgtagatttaacccatcttcatgatggatgtcaatcagctaacagccattctctgtagacttgtttgttagaacttgaggaccattagcaacaagtactgtttactgggcacctcttgtctgcggatattattaatatcggatgcatctaatatcacagatgccctgttaattattcacagacatttatgggtatgactagacatcctcataaactacttgtgaagggtatgaatctcttttttcctgaatagctaatagccttgtaatactagctagcaagcttttgaattttccgctagcttatcggtcttgaagcaataaaatgtatagaagattaactagcaagctatgatttttttttcaggcgagtcattagccacatgaacaaagtggtcattttgttgctgaggtttttttgtggcattttagtatttactttttcttttcgcaaaaagaaaagtacttacaatctctagcattagaatcagaaggttttctccttacagtactgcgattccatgaaactgtagaactcttgagtcttttaacttacagaacctccgtaaaacattttttatatattcatgagaagactaaaattttcataggcttctattgggggcaactggcctgagtatctaaatattacccatggctgttaatcttacttcacaaaattatcatgtgtaactttacagataccaagtgcgatccatattaagatcataaaaatatcctacagcaaagaagcatcagcatgttcaaatcaaactgtatcagattaatgacagatcctcttaatttcgttcagtcccacctgtttctgttgtaatgttgtcacatcaaatagatctgcatctagatatcacttatttttctagtcttgcgcagatgagtattgatttgtacacttgcatacttggtgagtctctaacgcttctattcacctgctagcaattttttgggcatcctgctaaagaacctatgagcagatggaaccaatttaacatttttttaaggcagtactcttttgctacattgatcaggaatactctcttttacagcttggtggatgatagaaagtcatctttttagtggaaaggtagaagatcatcagagatccaagatatgtgagcagcaaaggctccaacaggcaatctgagaggtacatcagataccacaattattccctcactgtatgactgcaaattttagcttatgctgaattatcaacaatcaagctgcatggtattaactttagtctgcatcaatcataagctttgcactactgattacttgctattatagaacaagatgggggcgcatatttcatgcattcatactgtaatgctgttaaagtgtagctatagcaaggtccaccaatgctatcatgtaggctacaaaagtacagaaccaaggtacaacattccctggcgccaatgaaaatgtcattttcacaagcatatatcaaatgatatggtggtcacccaacaatgtttgaagctacatttagtggttgtctaacatcagttaacctcgggattgtttcaaatgaaatgcgtgagtctattgcaaaaagtacaaaaggtggccacagaactacaccaatggtccaacacaactaggagaagttgattgtaggtagtgttttgtgccttatccaaatgcaggaactaggaaggcaccctgctagattaggggcacaggatcatgcaagaaggagagtgatagagtgatgtaggacgataggaccaagtgtgttgtggtgtttcaagcctttgtaggaaattatctgttggcaactaggcaaaattaggacttcggagaaaaagaccagagatgatttggagctttcaaaaccggcctcacattgatccatatgggtgtgtaggtcatggacaaaacatggtatttaaaattttaaatacgagggatctgaaatcccccacaccagggatacaatgatccagaatcactatggccatacttatctcagtgatgatatgtcccacttccattcacacagcctgcacatgccttgtacatttgcaaacctacctcactttgtatatcactgttcctagaggctatattttagccaagcatcaactccacaaccagacaggacaaaattcctaacccatgcatcttatagtcttgatcacattccgaaatccagcctgcactattgacaaaactcaaaagtgtggagacctcactagcattgttggtcagatccccaaatagaggtgaaagaaccatataaaaagcatgatatcttacacatcatcagttatgttatagaagcaccgtatgtgatcttaaagtctataacagttctatgaccttcatgaacaaaagattgtagaatcagaattacctggaaacattacagttacctaaatagttggtggagacagatactaccacaaaagcatggggtcgactgactagtcaatcagggaagaaacacctaaatagtgtagaaaccgtaaggatccaacgggactaaatggcatgtttggcctattgaggtatcatattataagatattgtgttaatgtgttattgaaattatagcaacaagttggatgaggtagcttataggaaatgaatacttaagcttgtaggccccataaatcaacctgcttgttgcttcagtttttctttggaggtagagagaaatttgaagagcaagaacaatcccttgatgagaagtcaagtctttttttggcctagtgtaccctatgaatactacaactttacaagttcaggaacaagagtatacggctaatcaagtactactatttacactttaattctgattatattagcattcctgcaagtcacatttttatgttccaacaatgtatggtaggcactaatttagtcactggatacaagcatcgagctctgacgtctcaagtcaatttgtcaaaatgaatttccttttcaactatactacattttctatgacatttcttatctgcatttcacagggtgggctaaacatcaaaatgtgtcgttcatgaaattttaatctaatgaaaaacatgagatagttgctctttgtcggggttgtctgctgatagtaagaggtaagtttgctcctcaggatgttgtttctgtttattttttttttaccctggaactattgtttgattgtttctgttcacacttttgggcaagaatagcacatgggtgatgggtctatcctgcttgtactgctgctatagcaacgcatcaatggcatcaggtacacattgtaatattctgcaaggctacaaccgcagctatatggctgtatcatcttgatctgctgttaccggtactctacattgtaatggaacagtactcatccgggggggaccattcgtttggtcaataccactcccaaataaatacggttgctgcatgtgagactgcatctgagctcactggccggagaatcctaaagcattttctattgattgttagcccagggcaaggcgaagatgaagataaaaaagaaggtccatatgggcgatgggcactcctaccgtgcatgttcccctcaagcgacgccttcaataactgtgctctgatctatcttaacttccctattgaatcacaggttagcttgatctggtcaccacccccccccccccccccaactctctgcacaatgcaaagcaaggcattcccttcctctactctcgagacaggagtgtatatattatacgcttggccgtgtgttgacgtacaacgatggattcttgcattgtgacaaaggcacgaattcagctgagccaggtgcgtgctacactacgccgttgctcagcctatcagcagccgtctttgattcactcgaggataaaaacaaccatctacttttgttccgtactccctccgtcccaaaataagtgtagttttgcactatttacgttcaacgtttgaccgttcgttttatttaaaaaaaatttatgattagtatttttattgttattagatgataaaacatgaatagtactttatgtatgactaaatatttttaaatttttcacaaatttttcaaataagatgaacggtcaatgttaagcacgaatatccacggctgtacttattttgagacggagatagtactagcttccgttgcacatttccacccaattggagacgaaaaactatccacggggctcagagcaccaccagccagcaatcgcgcgcaagttgtgacacggccctactattactgtactacccttgcagttgcagccaaggaggagaggagctagaggacactggagtcgacacgggtgagtggcgtgtcaatcgccgggcgaccggctgccgtcccagtgaccaacaagacacgcatgcagcgagcaaaatgggactacgtacgtacgtactgtacgtggtggtgtggtgctagtgtgcacgcgctagctggcctcctctgttccagaagccaacaccgggagggaggggatgccgtgtgcggcgcacaggcaggccggggatcagcaaatgattggcgatgacacggtggtggatccgtggatggatggattcgctcggggagaaacagcagcggggaaataattggggtggtggtgcctggtgcgactggtcatggcaggcatggacggacggccgagctggaaataatccaatccaaatcgtgttcgcaagtgcaaggttggagctgtgtgtttgtgtagcgcgagtggtgtgatgagtccgtagcagcaatgatggggtcgtgccgtgctgcggttggccggtcaaagcctcaaagctggcgcagccttctgtgctgccgctacgtgacaagtagtagcagctcccgtccagctcgaagcttggggttggaacggggctcggagtccggaagaatctgtacgctaatactccctccgtctcaaaataagtgtagttttatattatttacgtttaacgtttgaccgtttattttatttgaaaaatttttatgattagtatttttattgctattagatgataaaacatgaatagtactttatgtgtgactaattatttttaaatttttcacaaattttttaaataagacggacggtcaaacgttgggctcagatatccacggctgcacttattttgggacggaggtagtactgtcctgcacactgcactgcagatgaggtgagagcgagggttttaacttcccaatgggatggaggaggagaggcagcaaagacgaccggagctttcttcttcgcagtggcttcaaaagccacaccaagcttgtccttctgctgtcgtcgacatgtccaccatcgcgagaatctaaaatgcaacagtaatcaggattttggggctggagtcagtggtttctgcgtgcctctgtggtatagtgtcaggctgtttaagccggcccggtcgttgtttccacctgggggcagaatcatgcttacttggaccctgatatgacttcgctcctctccgatgagcctgatcacagctgctcagctgcagcttccttccgtcgaaatgatgatctccagtactcatgccttcagcatgtgtttctctcgtggctggctggagacagtaagcatctttttcgtttcactctaacctctacaacgactgtactacgccattgccgcaacaacggatgcatatgcttaatgctttgcaccggaggagaggctcgacgatctgagagacgggaggaggagagaaaaaggaagcatggaacgagacaaacgggagcatatctgcggcatatgcatgggacccctcgcggcagcagcggccagagccatcacgtgcccgcccaacgcaacccaaccccagctcacgccaatggactagtactgcacagtcctgctgctgccactgcaagcactactaccagtcggcctcaccgttgttgatccatcgacgccatcccggcatgcttgtactccgccgctagcggcttccaacttccaatccctcatcatactacttgtactatcacacaagattgagagtgagtttgtgagtgatcgaatcaattattcgactccgatacgagctacagtactactccttccgttttacaatgtaaaactttctagcattgctcacatatgtctagatttattaacatctagatgaatatgagcaatgttagaaagttttacattgtgaagggagtactacattgcaaaaaattgcagcagctgcaagggcataaaaattacaggacgtagtacgttggttagctttagctcgccgagacaagatccgggaaaggagagtgtgtactggtggtagtagtattgattagtggagagagtggaggggcccctttcccagaatgataagccactgataccgcacgcacccggacgagggctgcgaccccatgctcatggccgatagtgcccgtgcaacgcaacgtgcgtgcatgcatgcatggacatgggctacgacgacgacgagaccaacaattgaattgaattcggaccagtgcaggagtagaagaaaggtcgctctctcctctccccatgcactgcggcgtccgcaactccgccccatgtctcgtcgtcgtcgtggctggctgccatggccagccacacagtgacacagatacagttgtctacatgtactcctagtgtacagtgttggcgtgcatcgccttcgctgtgtcgttttttttcccatcgcagtatcacacccaattacccccatgatagtttgaccatttgtcatatttgaaaattaatgtaaatataaaaaagataaatcataaataatgtactttatattttgataataaagaaagacacaaacaaaatatataataattatatattttttaaataagacaaatgattaaatgttacaaacaaaaaatcaaagccacggagtacatgtattttggaacggattaactagtagtactacaattcagaggttagcgaagacctttcccggacaccttttcatttagtagtatcgtgcagcgttattaccggtcgccgtcgtccaccggagtgaagaggcgtttgccttgaggtccgtgcggcgcagcgagaaagctgcagcgggtcagggtcacgggctgcgttttgcagcgcggcgcggggcggcccgtgttgtaattgcggcttggcgttgcgtacgtagagtacgctacgcgtggtcaaaactgtgcttgtacttgcaggtagggtttgtgaaggctggccacctactgaactgacaaaatggtcacactgtcactgacaaattggcctgccagcctggcagtaacaattcttggcttgggttcatctttctggttcttcttccactgccacgccaccatcccccaaccacccaccaaagaatggagtagttaatggtgaacttaaaacggatggttgggttcatcaatggctttgagttgaatgtcacattcataggagtatctgaaatccgatggaaaggaaagattgtttacggtggattagtgctagactgcctagacaaggcgacgaaatggatggtgattcgaggaacgagtcgaagaaatttgacagcaaaatcaatccgaaatccacagcacatttcaacttatgagcagttttgttccatcttgaaattacagacgaaaaaagaaggcggcaaaatggggaaatgtaaacggctcaagaaagtggcgggaagagagagggggggggggggtaattaaccggccgcgcgtctttcaatccgtcgccgccgtcgacgatgctggcacaggggatgatatggacaatgccgccgccggcgtgctgccgttgctgtgcgcgacgacgtggctggaatgcacggccgtgatggtcttcgtggtggtggtggtggtggagctcgtcggcctcagcgccctcatcgggctggccagcgccgtccacgcccagctccggtggctccggccgcccaacttcctcgcgccgccgacgccgccggcggtggcagcgccctctgccgcggagagccagtaggagggagtggggcccatgccgccgaagaaccccgcgcacttgatccggtgctggtgctggtacacgtcgtcgtcgtcgtcgtcatcgtcggcgccgccgccaccgccgccgcccaggtggccgagcgcgcgcatcttgttgggcttgggctcgcgctgggactcgacgcgccggagcgtgcagtcgccgaagccgttggagatgcgctccaggaagtcgccggagaagctgcggctgccgcacccgacggagcgcgaccgcgccaccttccgcccgaaggacgacgacgacgacacctggctcgggctctccggctcgccgatggcctccagcctccgccccgacaccgaagaggtcgccgccgcccgtggctgctgctgctcatgcgcgccggcagcggagccacccctcgacgcccacgccgccgacgccacggacaccgacttcctcctcgcggcggcggcggcgccaccgttggcgccgtacgacgtggaggtgacggcctggtgcgtgtaaggcgacgaggagaggtagaggaaggaccagaagctcttcttccgcgggctctccgccgtcacggacgacgccgacgacgagtagtgctcctcgggccgcggcgccaccgacttgctccgcttcagcccgccgccggccagcgccaccgacgcggaggaggacgaggaggagctcgacgacgacgccttcctcctgccgaacgggatcagcttgcgggaggcgcccgaggaggagcggagcggcggcgggggctccgccaccaccgccgcggcgcggcggaaggacggcggcgacgacggcgaggcggacggcggagggtggccgccgagggggaagaaggggctggacttggacgacgacaccagcctccccagcttctcctgcaggcagaaggcgcatatccctccaccggcgaccgccgccgccgccgccccaggccggtagggatgctcgctgcagtactgaatgccatccatccccgccgccgcgacgccgccgtcctgatcctccactcccgccgccgcctcactcaccttctcccccatccttctccttcttggccggaatactaccccgcctcaggatctagctcaagctcgtagaccagctaggtagctagctaggtaaggcgacgtgattgatttgcctccgccactggacacctctcctgttcttgatccccctcctccgccgccgcacgacgacacggacgaacaagcagagcaaatctctggaggaagaagaggaggagagcaagtggaatctagtgctgcacggagagagagagagagagaagatgaggagaggagtgtgtgtgtttggctgtgtctgctctgctctgctgcggctgctggctcactctaatttagcgccatttctgcgactttttttcgattatttccatgggctggggctgggagggagtggcctggaattcgaggcccgggggtgcggtgaccgagcaggaaggccacgtgggggccgacctcttttcacgcagcgggggcaccggacagtattatgttatgtatatgtacgcgtacatgtactcgtagtcgtagtcgacccgtatgccacgggcatatgggctccacgttgcagtgacagaccgatcacccggtgagttgtgtgcgtgtgtgtgtgtgttttttttgcaagaggagttgaggatcttgttgtgaggtggctgggatggagattttttattgtaccttggtcttggttgaccgatgacatttataggtgaaatttccccggtgattggggggatgaacacggcgcatcccaccgcaccaacacatgcatgacagcccaccctggagtgcacgctttaaacatactgactgataagatgagcattatggttttcgatgtatgtttgtgttcaaacttagggccgccgtctattttttattttttttattggactagaaaaaacgtactccctccagaaaaaaaaagacaaacaaaccctgattttcgtgtacaacgtttgactatccgtcttatataattttttttataattagtattttcattgttgttagatgataaaacatgattaatattttatacatgacttgtcttttttaatttttttcataattttttcaaataagatggatggttaaatgttggactcggaaacccagggtttgtctgtttttttaggatggagggagtattgcgctgcaacagctgaaagcaattttaatcatattattgttagatttatctaaaaatatatatgggatttttttatagtattgatatctaatttgaaatttttattgggatgatggtcatatcatgtactatgttgctttcttatggtcttgtaagaattttaaagcaactagaagtccaactttcgtcccaaattaacatgtgagcttttttgaaaatgatttcttattcaatttccttatgtatttctaaaagtgaacgaacttaaaaactgactcaaatacgaacgacatacaaaagtatcagcagaaacatctttaatttttataatagtatatagaatagttatctcaaaatcattcacgtattttatttagcatttgggaaaaaaatcaaaatgcaactagaaaatataaacggttcaacaaagtgatttctggtattttaatctagtcagtgttattttctctaaggctgtgtttagatcaggggagaatttttttgccatgtcatatcggatatacggacacatatttaaagtattaaacgtagtctaataaaaaataattacagaatccgtcagtaaaccgtgagacgaatttattaagcctaattaatccgtcattagcaaatgtttactgtggcactacattgtcaaatcatggaacaattaggtttaaaagatttgtcacgcaaattaatcgcaatctatgtaattaattatttttttagtctatatttaatactttatacatgttaaacgttcgatgtgacagggtgaaaaattttaagctaaacaaggcctaagccctatattgtgcttgcagtgtactccatcatttgacagagccttagtcacagcacagatcatgatggccgattggccgccttgattattcattatatgatatatacatttatcattcgttatatactacctttgtctcaaaataaatacaaccatgggtattcgtgtctaacatttaaccgtccatattatttaaaaattttatgaatatttttaaaaaatagtcacacataaagcaatattcatgttttatcatctaataacacaaaaaatactaattatacacaaaaaacacaaattatacacaaaaaacaaataaagcgaacgatcaaatgttgaatataacagtgcaaaacagcacttattttttttagataatggaatagataacatctcagcctttgctcaacagagctacagccaattattacaatctaatacttgaacaaatagtgtagttcaaatagaattaaacacatccaaacattataattgaacaaataatgtagttcaaatagaattaaacacatccaaatattataaaagtgaccagaccaaaataaggaacacacaattattcaagtctatttatgaacctctatccatggttggcaaaaaagttgcataaccgtcgtctcaagcttacggcatgcaaccttcaagagctctctatcttcatcacacttttgcagctgtgcccaaaatcggagccaatatgttaccctgaaaattgcctacatatatgaagtagatggtgatttgtcaaaaaccatatcatttcctacacaaccacagagcccaacatatagtagtagctcctacaagaattagtttctctttttcttgtcaaccccctaaagccaaccatcaaacatatgagatatggaagaaaggaggtataaactaaaagaaaattgtaccgctctccaaacaaattttgcaaaatgacaatccataaaaagatgttgaatagtctcatttttcatgcagaaacaacatcttaaactgccattccaatttcgttttgctaaattgtctttggttaacacaacccctttaaacaagtaccacataaagatcttaattttaagcggcatcttaagtttccaaataaacttatttctatcattataaccataattaattaaggctagatacatcgaccttactgaaaacaaaccattttgatgataattccatctaaaaatgccaggagcttgattcaactgaatatgtacaataaaaatgcacaactcatgccaataaacaagattctgaccaaataaagctcttctaaaagaaacattaagcgaaacagatctcatgacattagcaattgaagaacttttccttcgaactatagaaaataaagatggatatttttcttttagagctacatttcctagccatttatcttcccaaaaccttatttgttccatgttatttacaatccaagaacccatatttaaaaaagtgcttttaactttcaagaggcctgactaaaaatgggaatcaccatgttttctatcaacttatgttatagactgattatagagatactttctcttcaataaagtttgccatacaccttcctcatttatcaacttaaacaaccacttactcaaaagacacttattttgtatttccaaattatgaatccccagatcaccctgatctttgggctgacaaacgatatcccatctagtaagtctgttcttctttttatgatcatccccttgccaaaagaaatgtgatctataataatcaatcttttgaagaacacctttcggaatctcaaaaaatgataacataaacatagttaagcttgaaagtacagagttaatcaaaaccactctacccccaacagacatatgcttacctttccaactacttagtttttctcaattctttgctcaatgactttccaatctttattactcaattttctaaaatgcattggaataccaaggtatttgacaggaaaggaacctaatttataaccaaagatatttgaatactgatcatagaactcgctagcttgaccaaaacaaaataattcacttttgtgaaaaaaaaaattcaggccagataacttttcaaacacagataaaatcaatttcaaattctttgcttgttgtaagtcatgctccaaaaaaaatgatagtatcatctgcatactacaaaatagacaaaccatcatccaccaagtgagggattaccccctcaagagtcccagcttctttagccctcttgattaataaagcaagcatatccgctactatattaaagaggattggagataaatgatcaccttgcctaagacctttataagtttgaaaattattaccaatttggtcatttactttaacaccaacatgacccccttgaatgaaagaaactatccactcacaccatttaggagagaagcccttcatccttaatgtctgttgtacaaaagaccatttaacgttatcataagctttttcaaaatcaatcttaaaaattacagcacttttgtttttatgatgcaattcatacatagtttcatgtagaataacaaccccttccataatgtttctaccgggtaaaagaacagtttgagtaggactaatcatcttctgagcaacacccattattctatttgtagcaaccttagtaaatattttaaaactaacattaagtaagaatataggcctatattgttgaattttcatggcctcaacgcacttaggcaaaagaataatagtaccaaagttaagagaaaataaaggcaaagtaccattatggaaatcactaaaaagatttaataagtcatctttgataacattccaaaagacttgataaaactcagccggaaatccattaggacccggggctttgttatgttccatttggaaaatggcctccttgatctctttttcagtgaattcctgtgttaaagcttcattctccaattgagatacttgaggaatatctacaaatttattctcatcaaactggagatcataatcatcaggcgggccaaataatcctttataataagtggtaacatgcgattttaaattcacatcaccatttattaattgttcaccatcatgtaattgaaaaattttggttttcctatgtttaccatttgcaaccaaatgaaaaaactttgtattagagtcgccctcaagaatatctttagttttagccctttgataccacttaatttcctcttctcttagaagcaggacaatctattcctacaataccatctaatatcaatttcttcctgagacaaaaggatagtttctgcttttttatcaagcaaatccaacttatccaaaatctcctttttctcttttttgtagacaccactagtatgtttagcccatccccttaggtgttgtcttaaacgacgaaattttgcctgccagcgctccatagaggaattaccttcatcaacactagaccaaatctccttcaccatatcaacaaaaccctcccgtaacagccaaccaaattcaaacttaaaactatgttgagcattacccttcaaacttaaaactatattgagcattactcagcgaggacgaatttgtatttaagagtaaaggagtatgatccgatatatctcgattaagagcaaccaccaaggataaaggaaatttatgttcccactccgttgacattaagatcctatcaagcttctcatacgtatacgttgggtttgctaaattatttgcccaagtaaaattcctactgtacatttgcaactctctaagacatagcccatcaataatagcattaaaaagaaatggccatctatcatcataattatcattatttttttcatccgggctacgaaatatattaaaatcaccaccaataagaattaataaggtttcatgactgcacaaattaactaattcaacaagaaattgatccttaaactcattttgggccggtccataaaccaaaactaaagcccatttaaaattatcaactatgttacgtatatggaacttaatataaaaatcacccttatcaattaaaccaatatcagcattaagtaaattgatgcctaaaagaagcccaccagacctaactctaggggtttacagtgccacaaaaaatctttaccacaaagatttttaagtgcagctggagagaaatctaaatctttcttaacagtctcagataatgctataaagtcaagttgatgttctttggttaagtcagaaataaacttatgtattttcgggtccttaaacccatcacaattccaaaagactcccttcatttgaaattaatttttaaaattcttcttcttttttttaacccttctacctttcttgttagtagtaggagaggatgacatagaattcattcatagtgttttgtctagtgctgtcacagtcagcacttatttttatacagagggaatacattctcaggcgacatttccttttccaaggagggatatgactctggtcatcatatcctcgcaaaacttcatccatccaatctggactctaagcgtgtgtttggtttggggacaaagtgggatgggttagacctatcccaattttctaggatgcgatggttccagttatctgtttggtttgtggtatgggatggttatagttttttgtttggtagaagggattgaggtgggatgggatggagaactttcacggaccattagggccgtctggctcccagcggctagctcgcagacgagcggaggcggccgttcacggaggcggaggaggttgcagacgaggcggcggccggacgcggaggcgcgcgcggcggcggtcgcggacgaggcggcggccgcgcacggaggcggaggcggtcgcggaggcgaggcgaggcccggacaagcggcggcggtcggtcgcggaggcggaggcggcggcggttgaggacgaggcggcggccggacgcggaggtggcggcggtcgcggacaaggcggcggccgcgcacggaggcggaggcgaggagaggcgcggacgagcggcggcagtcggccgcggaggcggaggcggttgtggacgaggcggcgtcggacgcggaggcggcggcggccgcgcacggaggcggaggcgaggagaggcacggacgagcggcggcagtcggtcgtggaggcggaggcggttgcagacgaggcggcggccggtcgcggaggcagaggcggtcgcggacgaagcggcggctggtcctggaggcggcggcggtcacgggggcaaggcggcggcgggcacggatgaggcggcgtcagttgtagacgagcggcggcagtcgcggacgagctgatgtcgtgcgctcgtcccaggtgggacgagttcgtccggctctttttcccggatcgattggtcccggatctgagaggaatattcctctcctgggaccaatccatcccacccacccctcaaccaaacacccctaaaagtgggttcgtcccatcccatcccatctcatcccagcaaccaaacactacctaaagtcactgctccctcggtcccaatgtctctttttttttatgggatggagggagtacttctagtcactggtttttcctcatacatctttttagaggtattggtgtataaaacccttatcctataataagtataatcctagatttaaattacattttaaaataaatataatcctacctcacttatcacatctatcacatcatatttaattttttatatatcttaccctcaactaccatcccactgacccactccataatccttaccatccttcactcaatagggtgtttgggtaatttttttctcttatttttccctctcactgctaaaatcacttacagtggaacggagagaataataaatagagtaataggttatatttgatactagtataggctgggaacgttctccttcccacgtaaaatagagtgatgggttacctcatgactaactaattattagctaaaaaattataaaaatagattaatatgattttcaagtaacttttccaaaaaaaaaagtgctccgtttagtagttcgggaagcacacgcgcgtggaaaatgagggggtggaggttgggaaaaggtagaaacgaactcacccttcgtacacaatgaagcctgatagaagatgtcattgataaatattcagattaccctagtttagaaaaaaaaactagtcgtaatgcatattgtatatagtattgttggatttcatcttgtttatatgaaatctaagaaactttgaaaaatcaatgtaggattgtaattaccatgaattatatgctagagtacgaatctttgtgttattgatacatcagtcaagcatgcggtctctttgaaggacctctgaaaaaacttattctaggaatgaactattttcacagcgccagcataattggcgccatagtctaacattatggcgtccatgaccatggtgccttccctctcgtcaccccttccgaagctgtcagttatatgaagttggtcagcgccgagtatctatttgaaaaaagaaatctcaaaaaacctatttataataaaaaaaattacaaatatttcctagaggttgagtacccatttgtaaatatcgttttgcaaatagttcatttttttttattaaaaataggtcctatgtgctaatgtcattggcgtttaccccttgccggaggtagggggacgacgccaatgtcattggcaccgtcatgttcgaccacggtgcctataacactggcgccacaaaaaagctccattccaggaatacgaaaaagttttttctatagatttatttgtaaaataagtttacaaaaaggtctaaaatataaaaaattcagtctccattgcccaggttgtagttgtattaatgtattatatctttcctattgaattcgttctctccaccgctaggtgatatgagaatactcatgctagctgctcatgtaccgcacgtgctagtagtaattttttaatcgctctccataactataagggtgtatttggttagctcaatatccctcgataggagatagcaatcaaaattttaagtgtgtttggttagtggtcaaggccatgagacggaatattgtatgaagatgttggatgagctcatccaccaaattggccgaacgatgatatcgacattttctaatctcaatatttagtaattgattattgataattaacacttttggttgttacttaatatatataattaatctaatttgttgttaattagtatagcctatgctcagattaatgataattaacatatcttattattaattaatagtttattgctatcattctatccatcctcatccatctaaccaaaaaactaaatggccatattcatgcaaccaaagaaaaagttggatcaccatatccctaaaaatatggatggttatatcctatccaaccttaatcatgaaccaaacacaagctaagttactctccaaagccacccaatattttaacaaacagtgtgcatatgttgattggacaatatggtaagttcatagagacttaaatatgacctatgaactattgcaactgcgtgaaatgataaggaacgtagccctcgagatatataacacaggatggttgcagaagagatgatcaagcaaggtcgtggaagaagataagtgaggctagagtaagaacagagccatgtgattttatccccaatgtaacacccgtgtattagctactaactatttaactattaagtaagctgaaatttgaaatttgaaatggccaaagttgcatgctttggcataagcttttaggggcttcctctagtttctttatgaatcatttttttagtgtgcattacgccttcaaatactttcaaatactctcaattgattgatgtgctactgctttgaaattacccattttgtgcgaaatccaataaattttgtacaaatgttgttgcttgcaaacaatccaggaaacgaatcaattgaatgatgtgctactgctttgaaattacccattttgtgcgaaatccaataaattgtgtacaaatgttgttgcttgcaaacaatccagggagcttcgtttctttggccaaccatgtgttgtgactagcggacttcttcatcgacatcataggctgcacgatcggcctcatcctctaagccataactgtgttgccgagcacatgcataccatgcttgagctactataatgctctatacttgctaagcttcacaaagattgtattctgcaccgtgcatgcctccgtcattagcttagctctgtggatacttgggtacaacaagaggattgatcagttgtcggcaacgagcgggcggtggtgctggcgtgagatcttgatcgacatcctgccttgtgctgcgtaattcgccattctaattttaattattatattgttctcattgcaactggcatgttcttgtgtttggtattagtcaagtaccttgtgatcgccttggaaaaagtcgtcactttcattacgatcatgtggttcataatgagttcatatgttgtcattagttagtaatgacctagttaattaacaatatcacaataactccatttgtatgccgcaataactctatttgtctcactatatttcaacagtgatgagtccgattcatattaagcgggggccttgaccccccatatttattttttaattcttagttataaatatatatttttactatgtatagcccttagttttcctgagtagtaatacgactcatcattttttttcccattttcccgtcatctctatttattttctttatttatctaacaccatgcgtatctctctatgcgtggctttcttctctctatgcgtagctttcttcggcaacggtgagtcgagaaacttattattttttcccaaatgcaacacttgtattaatatttaagtcattaagtgatctaaaagttaaaaaaggggcaaaattgactttttataactccgagtaaattcatacgcactcctttatttatcacttcctaaatatcaattgaatatttattaaaaattataaaataatttgataatgttgacatagtaggcatctaccatattaccaaacttgaattacaatgatgattcacacatcaagaaataaagcattcaattacaaagctgatgtacacatcaagaatcagtcatataccatcttaccaaattaatttgtgttttttcttatatatgagcagattaaatctataattgcatatttgtagagtgacatggtattatgatctatatcctataaacctatacaattcatccccacttagtgtagttaataggaatttattactcttaggttggccacgtcaccccaaattaagatagacattggatgaaaactcagtgggttgatatatgcaatcccactgtcttactggagagtactgaagccccaattctctgcaaactgaaaagccaaccagtcatgtccatactcgcaaacctcttccacttactcgcaaactgagtagcaccgccagccccaccctcttccccttcgccgtcacctcgctctcgagtcttgagtcctgccgcctagacttatcacctcctccgaaaaacgaaaactgctagggcccactaagggcaataacaatgtatatagcaaaaatagtccatatagatgggacctcatatacaatgtatatagcaaaagtagtctatatagatgggacccacatatatgagctttactattgtgacatttacaatgtatatagatagcaaatagtattaggaggagataggaagtaaagagaaataacatattttattctctatgggcaacccatatgtttatgggtaacttatgttatttcttttctataaactagttccacaatattattaggtggctaaatgaaatattgtagatgccctaatgagcagacttcatggctatcatcaagagattaatttcagtccacgcatatacttcctccgtcccaaaatatagctatttctagcatagtgttttgtctcaaaatgaagctatttctccacctacctcatcctctcaaccaattacaaccattcttctccacctacttttcctttcaaccaatcacacacttcctccaatcattctcacctactttcttaatatctgtgccaacctcaaaaatagctacattttcgtacagaggaagtatgtgtttattcagctccgattgattgatagcccgacctcttctcgattgattgatgtattaattatatatatatatatatatatatgtatatatatatatatatatatatatatatatatatatatatatatatatatatatatatatatatatatatatatatatatatatatatatataggaaaatgattctatacacctgggagtatgtactcccgctccatctaccgttcatccgcagcttgcctcgattgactatcccgctatcccatccctgctaacgggtgcatccacagcgaacccgttttggtttatatgaaaaagaaattattcccgtaatcccggattatctccccaaaaaaaggaaaccatcaaacaaactgcttgcataaatctctcgtctccgatcttaaaaaggaaccctcgttccaggcggcggcggcggccagtccaattcgccgacgcggtacttcttccacctgcaggcagcgcgcgttccatccactggcggcgtgcaccatgtccactcgccgtgatcatcagcatagcgtccccgcttgcggcagcgttccggtagggatggatgtattctagccaacggcgcgacggctacaccaatgcgacaagccaaggcagctgctgcggtggcctattaacaacggtatgagtagtttatacttcttgttctttttcatttgatatctatcgcccaaaccttccgtgctaattaagattgaaatatcatatttttgtttatttttaacgctgataagtaattctaatgttgacagactatcagcattgtgatcggacggagaggcctagtcggtgctggtggccacaaccacacaggtcttgcattgtgatcggctattcgtctccaaagtacaatcaaatcctggcgatggctgtttttgttaatgtgcttttggttattctccattgaatcaaatcagtgtccacggtgcagaccatctcggtacgccggagtcgacgacacaatccatcggttcgccagtacgccaggaataaataaccccacgaatatatagttaatcgaccatagtcagttttaggaacgtgccgtgttcttctgaatctttgaaaattttggaaatacatgccgttttttctgaatatttggaaatatacaccgatactttttgcatcatcaaacttgcatgcagtacagcagtagtacgtactgctacagagtaaaatcaaaatagttaacagatcagtatataccgcgctcctaagttaaaaaaacagtatgtactaaaaagggtatatactgctagtaactaaaataaggtatatactgctagtaactaaaataaggtatatactccttcaatgagtaatatatactgaaaaaaataaaaaatacttaacaaaaagtatatacctctaactaaatacggtatgttctaaaacaggtatatactttgcggaaaaaataaaataaaacatgtgtatataccactaaatagaaaaagtatgtacttaaaaaaagtacatactcccgctactgaccaatacagtatgttctaaaacatgtatatacttagctaaaaaaaaataggtatatatatacaccactaaattaaaaaaaaaacttacatactgctactaacaaaaaaaaacagtactactaaaagatgtaatatacttcgagtgtatgtactgaagaaaaaaaagtggtataaactcgtttgatgagaaagtagtatatactacttattaagaaaacacatactacttttctataaaaaaaatggtatatatatactgccactatcttaaaaatagtatatatactactaaagtatactaagtaaaaaagaagtatataccactaagtaaaaaaagaactatacaatcttaaaaatttgaggtacatactgctttaaaaaagtgaacgtacataactacatactgctaatgatacactgatgtcacgtacgcatagtcatagtcacggtgatgagcaagtacatactccaatgagacatatatatatatatacactgcatgttataacaaaacagtatacctcttatcctgaacagtatataatactgcctcttgtcctatatatgtactgctttttttaatcgatgggcacatactgctttttattataggcataaactaccttttatcgtatatacgtactggttttcaatagagtacatatatatgctgcgagtagaaagtatctgctctatatgtatgtactgtacgtacttacgaaatttgaatctaactgcatgcatgcactcgcggttcaaatgcttaccaaaatcaggtgtgcatgctagcaacatgcagcaatttgaaaaaaaaataatttcttttttttcaaccggttcaattagatggtaatggattatccactaggaagagggagtacatacatctgggtgtacaaaagagtcatcctatatatatatatatatatatatgtgtgtgtgtgtgtgtgtgtgtgtgtgtgtgtgtgtgtgtgtgtgtgtgagagagagagagagagagagagctccagttgctttatcttggattgttgcattgtacaaccgggacatatgctagattgatgaatcaacatcagcactggagaggattatcttgataataggtatctggctcagattaacctttcacgttggagccgttcagagtggtagccttgaagttagagagttttgctatttgggttggggtcgtcctttctgcggtgccctggtttgaaatcaaaacctcctctctcagtagctactgaatatgttcaagaacattggctgcattatcatcaggtcgtgtcaatccacggtagctctggacagaaacgttgttgtcctcttgatctgaggcaggcgattttattttttatatttacccattcttcgttcattggatggttcagattaacctttatttccccttttgcctaaacagatagtcatcggtctatttgagaggttcaacatttttcagagtgattgaaccgatttagcctctacatgctagtgacttctggaaggtcacccctcctttttcatgcttagctcatacgttctcttttttcaattgattttgtcacgtatcttttctctaatggcgaggaacaaataggtccccaatttttctatcttccagtttcattggtttgttgccaatgagaattatgttgtataataagttgttggtttcacaacatttgaaggattatttacactttttttagtatcacttcttttcatcctaatgatgtaattgcatcgagcgaattgatcaagaagaaaggagaagtgcaaaagtgcaactaatattcatttgcgtgcaacaatacacaggtgattgattattagcctgttgagaacttactttaagcatacactaaccagtttttaattatgttttcagttttttattaccatccattcacgaagtattgttgctatcctggagtatcttatgaaatacacaggatatgatgaactatttatgctggtgcatcttccgtccttctgcttgctgtttcagagcatcaaaggatggatatttctgaaatttagtgatcataaccatctgaaaacatccattttaccttatatactgcaatagtacacactatcaggtggattatatcctagcaaaggactaaaacgggggccttctaaggctggtttgatttgtggcccaaattgaccttaccggtatttggtaattttaatagtttttagtatttattttgtttcaaaccaaattttgacaagcctagaaaaatatgtcatttcaatagttgacttaggctaccgtgacttcaatccaaacaagttttatggaacaaaaggagtagagagcagtaatcagcttgcgcaaataatcagtttgcgtataactgtgctacatgttaaattcatgttgttttattatttttattgttctactgtgtaaaaaagcataaaataaattatatgataaatcaagcctgacaaggaatcaaatcaagagattacgtacgtggaagctaaaagttaccacatcaattggtacgtctcctaacttagtgtgttatgttcaataaaagatggaaaaaattaaggtctttgatcgcatagctttttctcagttaacttactacgttgagatgataagcgatttaaggaaaatcggcttgcaacagtttcttccaccagcaaatagaaaccgactggtgcatttcagccaaattttattcatcggtcttctaaatatttcactattccactgtatacttgtggtattatcttcatccatccatcagtttgtaataaacaaaatagcaccagccaataaaaccactgaataccttatttattagcctattataagctaataaaaattggacgccaattaagtactccacctgttttagagtgcaaggtatttttttcaagtcaaagcatttcgattttggccaagttaatagaaaaatgtagcaatatttacaacagtaaatgaaccaccactgaatatattttttctgctaaataaacttggttaaactattaataaagtttcacttcgggttaaaagaagaccacaagcatatagatgggctatgaaataacggtcgtgccaactggcgcgacaatttctagttattaattaattctgagcgcaaagttactgtagactagattaaaggaaattgcaccaagcaaagagaataaaaattgtcagtaacttgttgccatctttaatgatttttcatcctaggctctacattaatcagttaatattaaacctacgcactatcaagatttcatcaagaaccaacagaagaaccacggaacacatctaaactatcagctagcattagcagtactagcaactaaaaataaataaaagaaacatggtaataagagtacaaatgtataattctcataggttgcagttttccgccacagctgcacgcaatgttcggtgttccggtgaacatgttgataataataccgtgtccgcatgtgcaatcagtgttgttaattacaacggataggtgcagtgtcgcctcagttaatcctactttttgtttcgatggctacaccaatggtattattaactcgccggttttattccgtcctatgtaagcttctttgcatctgcaccatatgctgccggttcacgtgcatagttggccatgaaaaatagttgttgctgtgaaatgcagtactactacttctacgtgctaattgtggtgatttggtgaaagcttcctttaaactgagataaaaatagatacgttttcacaaataattttgtaatattacgaatatatacactatgtaataataaaggaaaaagaaaatgactgtagtagacgataaactagagatacattatccttacatgccaccagtcattaccttttcaaaaagaaaacctaaaaagtgtaatatgaagtttcatggaacaattctcttgtcaccgtaccttgtcttatagtaaaattcgattaagagggtgtttagatataggggtgtaaagttttggcgtgttacatcagatatacggacacacatttaaagtattaaacgtagtctaataacaaaacaaattacataatccgcttgtaaactgcgagacgaaattattaagcctaattaatctatcattagcaaatatttactatagcaccacattgtcaaaccatggagcaattaggtttgaaaagattcgtctcgcaaattaatcacaatttgtgcaattagttattctttagcctatgtttaatacttcacgcagatgttcaaatgttcgatgtgacaggataaaaaattttaatgtggaatttaaataggcctaattttaacttgcatattgtaaaagggcatatacaatacaatagctagcgttgtcttaaaaataataggctgcccataaactgccaactacaaatctactgacgtggaggggagaaaaacatggatgttaagctaacatcgattcttagcgcgagattaaacaaaatttccctgaatgatgccagagaaaggaaaaaaaaagagtaatagaaagttattttagaggattaagcctttatggtatttgactttttagaggattaattaacactcatataaatatgtgcacacttaactataaaaatgttgcaagggaatacttttttgatgacatgtattacctatattcttataccaggctcaattgttgtatttatcctaggggaaaaaacttaagttattttaagtgtttttggttagtgacttttcgtgttgtgcattctggagtacattttgcggactgccagcaaagatcattttgcctccatcaattatagggcgagtttaatttttgtcccttaatcgtaaaaccgagtacaaatgaagtccttaagacagtattgagtccgcttattatgtgacgctaacgtggctagtgaactccagaaacaggctaactcataataagcgagacaaggcaggccacctaaccagataggctataggccgagttgatcaggcccgttaggacccagtttctaggggccaaaagcccaagaggctgacatgacctgttgctccaaacaggggtcctaccgggccgatgattatcggcttctcttcgagacggccgtactaatcggagcccatcaaggaagcaaagcctgcatatgtgccctaccggcgaatttttttcatttttaattttttttaaaaaaatatttacacaaataatctatcgttagaaaaatttacaaaaatagaccctgccgccctagtgaagggcggcaagctgacgtgacagacggcggctcgacgggcggtgacggccgattgaaaaagttgaattttttgcattaacacccttgccgcctttacagagggcggcaaggggcctccatgcaaaaaagccagctcgggaagggccattatcaatagagctggaaagaagcatttggctgcggcaaggggcctagatgcaaaaaaaccagccaaatgcttctttctagctgcgcaaattgcatttcgccccttgcagccctctgtaagggcggcaaggaccaaagcgcaaaatatgcacacggcgccgttgagccgccgtctgccacgtcagcttgccgccctccactagggtggcagggtctagtcgccgccaccccgctccaccgtcagtgaggaaagagagagatgaagagaggggagatggggagagaggaggaagaagaggggtgaggatgacatgtggggaccacgtgggccccaccattttttattaatttctatgtgaaactgacatgtgggtcccacgagctttattatttttctggatcgaattgtcacgtaagcgccacgtcaatgccacgtcagattgagaccaaaaccaccttcaaaactgccgagggatctaatctgcatcggttttgatagttgagggacctgttgtatctggttttacggttgaaggacgaaaatcggattcgttgacagattaagggactttagatgaacttattcctaccagacgatcccatacaaattcatctaagatttgttttttaaagaaacatgcatacaaattcatgaaccgtgggcgctttactgctgacaagtacattgtctattactgaaaaataattaaccgtaaatacgagtatcaatatcaaatttaggacttaaattcatatgggttgattcaatcataagaagcctaggccatatttggtatagctacaactcctaaatttagctttaggagttgggtttggagtggagttgtggaactgcctaaacccagctccacaactatagttctttttatgagagagctacacccagctctacttctattttttatggagctgaaactatttggctgagctccagctccaaaaggggtggagctagagctggagctgtgctaaacatgcccccagtcagttaagctacgctcacttcacatttgaaattgcttttgaaacaacctcatttcacttttccaggacggtaaaaaaaatagcatcttttgtgctacttaaggattattatttatccggaacacagaaatgctataagtttccatagaagttaatttaaaccatataaaattcttgcgatatttttgggcaaaaaattgtgcggtacaagtacaattgcctatcttgtaattcactggttctaatttgtaaattaagcgaaacttcatgaaaattgtgagttaactgtgtgttattgaccgtgtttgtctgcgctgttgactggatcagtcttttgcttattttctccttaagatgtagattaaaattaagattaagattaaattttttacgtaaaacgagatggtattaaagtatgattaattgagttttaactattacaaacttgaaaatagattaatatgatatttagagcaactttcatatataaagtttttttttgcacgaaacacaccgtttaatagtttgaaaaatatgacatgaaaatcttaatattcatccaactcttgttggagaaaagaacggaccatactcacgcccgcaatcttgtagaaaggtggtgccaccaaagatgctaatgtttcctctaaaaacgactctgaagtctgaagtctgaactctgactgggtcatttttttctgaaccaaattctccgctattagattatgttaaaaccaactcagaaatcctgtctcaaaactaatcacagatacacctgaaaatatgggctaatgagagcaaaaggaaaatatcattggaattagcaaacaatccgtaaacttttttgggtttaaaatcgcgtatctgaattcatgaaaaagaaagtagatccatctcagcacaaacctgggcaactcccatcgcgttggaccccaaaagggcaagcttcccgcgaaagctataggcggtggcgcgaagccgaagcgggagggtttgagaggaaaaaaaaaaagagaagaggagagaaaaatctcacggcgagcagcgtcgccggaagatggggaaggagaggggaagggaggagcaggtggcgacggtgcgcgcggtgctcggcgatgggacgccggagatggacatcatccgcgcgctccacatggccggcgacgaccccaccagggccatcaacatcctcctcgactttccccacgggccgccgccgccgccgccgccgtcaccgtcgccgtcgccttcgcctccggcgggtaaacccaccaaaccccaccccgaatcgaccccgccaaccaaaacccctgcccgttcgaagccggcggcggcggcggcagagaaacctaggcccagtgtcgcgcccgaatccaccaatggcggcggcggcggcgaacattggtggttggtggggagcgtggagatggcggggctgtccacgtgcaagggccggcgcgttgcctccggggatgccgtcactttctcgttccccaactccccggtcgccgccgccgccgggggcaagagccgttccggccgccccgccctcgtttcctgctcctccgagatcatgcgcttctccaccccgcgccatggggaggtacattcgattcatcactcccgctttcgcgaatcaccgtggtctcacgatttttgttgttgtttaggtcggtcgaatccccaatgaatgggcgaggtgcctgctcccccttctcaaggaggggaagataaaaatcgatggcgtatgcaaatccgctcccgaagtacttagcatcatggacactgtcctcttgtccgtaaggtatctgaagaattgcatcttaaagttactataatccatatgcagttctgctgttccatctatgttattgtgattgtggctgtgtgctctgtagtgtctacatcaacagctcaatgtttcatggccaaaagcaatcgacacccaaggctgctcgggctgctaccgaggattccacgtttcatccgctgcctgcacttttcaagttaactggtctttcgccctttaagaaggtgagtgttgtttggcttatgtgtctcttgttcattgtgttatctagcaaaatatataaaaaaaagtgctgccaaagtttcttgttagaagaattgagactgctttagatcatggtacgcatgggtgtagaaccccactcagtaagttttagtcatctttggctcgaagttgagtgtcaactgtctatcattcgatcaaattgatgccaagttgcttcttgatgcttcacaaagttcaccgctataattacactcttggaatggataaaattatcactgataaacattgtaaaaaaattgaaaagtatgaaaaagggtactattctgctcagcactgatatatgtataaataggtaacgtagaaaaccatatggttgtttctttttaagcctgcttgctcttttgcaaaaaaaaaaaaacagcatattttaattgttaagatcttctcttttttgttctaatcaaaaccaggcagcatttactccagaagatctctattccagaaagcgtccgcttgaaacaaaggtaaactattactgtttcataagcaatgctaggtactgtcataaaggttggcctcacatctgcctcagcagagcagtgcacctgccacaaagttgactactgagaagttgagattatcgtctgatggaaacgaagatgatcatgctgaaagaattgtttcagattcagaattggatgatataattggaatctcagacagttctgctttggaggtaattgaacttatctgtttgttgaaagtttcagagacaagcttattgtatgacttcagcagtgcgctaatttatattttgtaggaaagggacccccctgatgctctgcagtgtgatttacgcccttatcagaagcaggcattttattggatgatgcagcttgagaaaggcagttcttctcaggatgcagctacaacgctgcacccttgttgggaggcatataaactcgaggacaagtatggcttggttatattgtttgagccgtttctctattacaatgattttttgaaattaacattaggacgtttatactgcattcatttcaggagggagcttgttttatacttgaatgtattttcaggcgatgccaccactgaatttcctagtacactgcaacttgcaagaggaggggtaaggatcttctcaatattatacatccttcctttctttcgataattataatttctggttttagcatatccattttattaactgaacaataaattataagattctggcagatgcaatgggactggggaagactattatgacaatagctcttcttcttgccgactctagcaaaggatgcatcactactcagcattctactcacatatgtgaagaagctagtggactgggtgaattgccagttcagcctcatgatgatgtgaagaagctagctatccctttctcttttagtaagcttaggaaacctaaaaccccgcttattgcaggcggcaatctaattgtctgcccaatgacactacttggtcagtggaaggtatgaatctggcactgtcaccatttcaactttgtctattgagctatttttatgcacatttagtacttgtagaaataattggaaatgtaagctggacttgttcctaaatgtgttgttagaactattgtcttaaattctcaaatttttattttttcccaaacaggcagaaattgaagctcatgctacaccaggttctgtaagtatatatgttcattatgggcaaaacagaccaaaagaagcaaaccttattggtcagagtgatattgtcctgactacatatggtgttctgtcatcggaattttcaaacgaggtaacatctgagattttatagaatacagtcacacctgtcttcaatatattattagtatgctgaagcatttgctgaagtctttttcattggcaccagcacatgtggctgacttgtttgtataccacttgacccattgttaggctttggcatatgctactacaccctctgttcataatttaggacaaaatttggtcaaacttttcaaattcttaccatcaattttatattagaataagtttataaaatctgtcatttattttgtttttaaactaagcattttagaaaatattgatggttgcaattgtaaaaatttgaccgaatcttgccctaagcatcaaatatttatgatccaagggggtatttacttgggttatttgtaaagactaaagagagttcaatggaatacagatagcacatcatcactttgcttgtgttcttccttcattcacattttctgccaagggtaaatatttgtttggttatgttgtgcacttgtgcctatataatctgttggtttagaagtttggctttcttacaatttggtttagggatgaggatttttatatgcaaatgatgaaaactgttttggtcactactgctattttatactttgtttgattatgcgatctgattcttgaccgaagtctgcgtgctttcttgcagaattcaacagaaagtgggggtctgtactctatacattggtttagagttgtgctggatgaagcacacatgataaaatctcccaaaagtttaatatccctcgctgctgctgctcttacggctgatcggcgttggtgtcttactggtacacctattcaggtgaatacaggagtagatttgactgtccatataattgaaccaatcctatttaaccctagttttcataagaatgttgcagcagataaatagaatgtgcactcctagttttcctgcatctatcagcctcttaggtgcttatgcattcaatgttttttacgagttttactctgatggcagaacaacttggaggatatatacagccttttccggtttttgagggttgaaccgtggaggaactggtctttgtaagtggatcatttgtttaccttcattgactagttttgttctcttgtcaaaattgtgtagaccttgtgaaacttagatgcatgtagtcatagaaatcaattgtactgttgtaggatgcaaaattgaaacttttgacgtaatttactgttcagattctctattttagtgcatatgttttatgttgtcttgtcgattgttttcttacagtagtagttccaccttttctgtttgagaactttttttgggtttaccctagagtgttgccgtgatagttccaacttccaaggtgcaagaccactgttctcctttcttccatttattaacttggctatgcacttcattttgttttgctgacctgaatctgctgttttgcgcaaacgaagtatgcttgtgatgttgtagagtttttgtatattctgttagcccttactccctccggttccataattcttgacgttttggacaatgacacggtctccaaaatgtctttgactttgttttcctattataatatatacaataaataaatgcatgtctatatatgttgttctagttccttcaaacttaatatttttaaagttattgatcatcaaagttacaaaagtttgacctcaaccttttccaaaacgtcaagaattatggaaccggagggagtaccttgcaataaatttcaaatttactattgtcccatatacacgaattttattatcgttatgctattcaggtggcataaacttgtgcaaaaaccatatgaagaaggcgatgaaagaggtttaaagctagtacagtccattttgaagccaataatgttgagaaggaataaaaacagcacagacaaggaaggaaggcatgttcgaccttgtctatgaaatatttcaattccttagctctgtaatttacacttctgtttttttgcagaccaatccttattttacccccagcaaatatcgaagtcaaatactgtgatttgtcagagactgagaaggatttctatgatgctctgtttcgacgatctaaggtaatgcatcttcaaccaaagaagttctactcgtttggatttctgagagacaaattgatagtcttgttctgctttgataggtgaaatttgatcaattcgtggaacaaggaagggtcttgcacaattatgcttcaattttggagttgcttttgcgccttcggcagtgttgtgaccacccatttcttgttcttaggttagttttcagaagtcacaattagcctgtttaaccagatttttcaccaaacaaagataaatgcatttgtgctctccagagtaataggttctgaaaattttgggtccatttgatcctacatgcaggcaataacttcatctagaagttgctatctacattatctatttgttgccattggttattttctgatgagagcttcaatgttggcagtcgtggagatacacaggagtttgctgacctaaacaaacttgcaaagcgtttcttgcatggtggtaatggtgctgtgaatggtgactcttctcttccctccagagcttacattgaggaagttgtccaggaactgcagaaaggtgaaggggagtgtcccatatgcctggaagcctttgaggatgctgtattgactccctgtgctcaccgtttatgccgagaatgtctcttgtctagttggcggagtgcatcagcaggcctttgtcctgtctgtaggtagattatgctcactgttccttatttatctctgaattttgtttacttggtatattctgatctttatcttttgattccactgctacagaaagtctatgagcaagcaggatcttattactgctccaactgacaatcgttttcaaattgatgtcgagaagaactgggttgagtcttccaagatttctttccttctacaggagctagaagttcttcgcacttctggtgcaaagagcatcatttttagccagtggactgcatttctggatctcttacaaattccactttccaggtaaaaactagagtattagatttcagagatctgtcatgaggctattatttacttgctaagataaccagactttataggccagcatttgtgcatcatgtttctctttttccttactgctggaatctctgtgcgtgatagttttcatattctttatttcaaactctttcggacatgtgacttgtctggatcgttctaacctgttgatcctgtatcaagcccttatttttccttaaatggttggatgacaactcttttggcctctttctttatactaattgggcccccacaaagctagaaattcccattaatcagaaaagctagaagcacccatttattacatctacggctaagatttgatataatataatacatgcagtgatgacaaacaaataggttttttgcaacacgtataggacttgactccagtatggattcatattcggttgattgttgcaagcaagaagttgttgagtccttttcactaaatataaaatttagtttagatctctttatactgtactacaggttgatgactagttgaattaattataatattatctaaaagggcaacagaaaattttgttgttccaaatcatggatactatgaaaattcgtgtatcagtaccaggtaccatattggtgttttggggaatggtgtattgccacattgcatatctgtacccagattggcccatctgggtatcatagttttgttacatattttaacatagcaaattttgttcttaaatttcgtatcatagacagcaattcatgagcatgttatcacactggcaacagtctattaaccgtttatcaaatgctcctttgtgacatacttgaagtatttgatcatggctctttggaggaactctactgttattttgagtccagttctatatggatcttttatgttttcattgtagcaaccgggtctacctttgattttttttttttggtaccaattagtctttgggtttttgcatggcagacataatttctcatttgctagactggatggaaccttgaatcttcagcagagagagaaagtaatcaaggagttttctgaggacaaaagcattttggtatgctcttcttttattatatctattggcttcactttaactcttcttggtagatgtgggcatgtggcgctataaacagaagtatctaatattttcgttaaactagaaaaaatgcccgtgcgtgtgaaggctattttaatcttattattgttatatgttttatttgagatgaaattcactgttaaattcgcttggatatatattttgttagaaaatcatgagctgcaattaggaatctgatcgtcacaagttagcatgcgagtttttaaagagatttcctatacaattccttttgtatttccaaaagcaaacaaacttaaaaaccgactcaaatacggatttgtatttccaaaagcgaacgaacttaaaaacgactcatacacggatgacgtaccaaagtaccgacaaaaacatcttcaatttttataattgtagagaaacgaacgaacttaaaaactgactcaaatacggatatatatttccaaaagcaaacgaacttaaaaactgactcatacacggatgacgtaccaaaataccagcaaaaacatcttcaatttttataatagtagagatatggaagtatattcatagcaattgacttatgcaggttctgcttatgtccctgaaagctggtggtgttggaataaacctaactgctgcatctaatgcatttgtcatggtatgttaccatcaagttctctgtgcacagtttctgaatgaaaacatttcggcattaaaacatatagttgtgtatactggagctctataacttccttttttatgagattagaattttggtcttcctactctaatcttcactattcatatttattgttaacgaggttcactatcctgattgaaagcaaccttatgagattttgaatctcgagtataagtagaactagatttgtttactagttttacagcttaaccacctaaaatctggtttatctagattaagaatttagtataaaaccatactaataaaacactttttctttctctatagttcacaattatgagtttatgaaaacagtctaacccttttatcaatcctaactgatcacttaatttagaattacaaaaaaaaaatcactggaacatattcacataaaatcaattagaaagcatagaaactcatcagacaaacagctagtaggaaatgaaaataattgcaaccaatcatttttgtttcatctgcaatataacagtattttgaattttttgaaatgctcaaaattgattagcaagaatacacaggagaactacatatatcctacaccagataatgtcgtaaagtttgtgatgtaacggcaactatacgatactattttacttttcaaaagaatgatttttctacaaaagtggctcatagtatccaacgttgaaatggtccatacatatgtctttattctaatgttacagtgtatgcttataaggctagcataaggtaaaacttttgctgagatccgttggtgaaaaatcctatgggctcataacagcctatattggtctaccgactaaaacattatacatttcttgtgctatagtgatctactaattttttgccgtgttagcatattcttagcatcatttgtgtatcgtaatcatgtttccttcaggatccttggtggaatcctgctgttgaagaacaagctatcatgcggatccatcgaattggtcaaacaaagagtgtttccatcaaaagattcatcgtcaaggtactttgtaggtgccatttgttaaatttagtcttctgataactcgcagaacctgtgccatttgctcaaggacttgagaagatggaaatagcttaactaatacacactgaatctggtcaacataatgcaaaatcttcattgccatactttcttaattatggtttatgatgacacagggcactgtcgaggaacgaatggaggctgtgcaggctcgtaagcagcgaatgatttctggagctttgacagatcaggaagtacgcagcgcacgtatagaagaactgaagatgcttttctcctgacaaaccaagagtcgccattcgtttactgaaagccaagaataggaaggtaaaacgaggggtaagaattccaaatgttgcaaaaactcgaaattcagatatcatacgccttctggcattttgctgttgttgtatacctttcttgtgtatactaatatgtatgaatagtggcgtggaagaaagattgagagctgacagaagaggtaattcattgcatatgtatgtacaacatgggcttaattaatggtacccgtaacgtaaccgaccaagagtcccagacgtttcaccgagtgggacaataaccgaaagcaacatggaaaacgatgtgcattgccatggtgataatatatactagtgccaatcattcttccacttgctttcagtattagatgcaaaagatggctacaagacgtgttaatcagatatttattaggaccaataactattctggaccaataaaagtactcttctgagaattgacagttttgtagaaaaatagaattggattccccagagaaggagattgaagcgtctgacttttgcatgcgggcagtatatgttcaatctcatacagaatctaagttcgcattgtacaatttgcagctacatccaaatgaacaattcgactttgtatgccaattatgagccacaacaaatcggatctccaaaactgtaacagtataatttcacttagtaaacactaatgtatatatacatttagtagaaaaaagaaactaagattaccatagttcacagatgctgcataccattatccaaaaaaaacaggtgatacatgcagcttactgtgacctacacaaatggcagtattaactagtactataacctacagcagcggccagaagtgaaggaaccctagccatggagccaacacgctgggcttcttggcagagttggcctcgtcttccccggacaagccgccggtgtcttcgcccgacgagacggcagccacggcggcggcggcggccttggggcagaggaagaagctcctgctgccgagctccatgagcttctcctccgggttcaaacctacgctcaaaaaaacacgacagccgtttccgatcaggggaggagctctcgccgtcgccggcgccggcaacgaaggtgattaaagctataagcagtagaaggagaggcgtcaccgcgtcacgtactctgcaagctgaactgggagaagtggagtccgaaggcggcggggtcggcggacggcagcagcggccggcgcccctcccggatgtagagctccacggcggcggcgaccaggtcggccacgctccactccgcgcgcgccatcacgtgcagcggccacatgctctgccgcaccgccacggtcagcagcaccctgctcggccccgccggcgcccgcccctcgccgccgcctcgccggaagctctgccccctgaggccggcaagcaggtcgggctgcgtccgcggccgctgcttcagcagcgagtgtcgctgctccgcctcgccgcgcccgtggaacgacgccgaccgctgccgcggcttagccaccgccgccgctgcatgccgctgcctgtccttgtgctccatcgtcgatcaatcaaaccagaagcaaacagcgaggaaggaagcagaggagtgagctgcgattcatggcatgggagaatctcggactcgagctgctctttatataaagcctctgaggagacttgggcgtgcacgaggagagggagaagcgaagaagggaggaagagaagcgaagccgtcggtttgtggtgcgcgtgtacaattattgagggggggggggggggggggggggggggccgcggggggccacgtgtgaggtggcccgcgcacaaccacctcggacggagacaagtgtaaggtttaggagccgtgtgagatcgcggctcgcgactgaggtctattggcgcgcgtggagcacgctacgctagtacgatcgatcaccctcacggcctcaccattgtggtgctagtgtagccagggcggacacgtcgattattaagcccggagatgatcgtgatttttaccgtgatacggcacgtatgccagctgttaattggacctccctttggatttcctcggaggtgttcacgattccccaatttgtacccagcattacagagaaacattttttttaacgactcgcaccaaacaatatgaaattcatattgatataccagaaaaaaatactacatgattacaaactcgcttcggaccgtgtgaagttcatattgatagagcataaaaaaaagttgacaggtcgtaactaggaaaacaaagaaaaatagccaccacccacgtaccgacaatatcaatacataaacccaggagaaagctaccatcggattggccgccactaagcgtggccaatcgtcgttagaccaacaaaggaactacagctgggatcgcccaaaactcaatcgataccaaactccactctatccacatctttggagttgagggagaaatggtgagagagaagaatggaaccgctctccacctagaccatccaacgtggccaacctgcataaattaggacaccgacacaagaggacttagtctagagcgagcttgtatccattgttttggaggttttggcaagagactgcctagacgatacctcctgggaaagaagcgacgaaagcggcggcgccgccgtccgtcgaggtcccaaagagaaccgagaccgagttttcacccgacagccccgatagaggggatgagacagcacacaatgccctcaagaggggaagcgacgctcggaaacgccaacattatcggcctagccaaaaccgggctatgttttcacccgccgcttgtcgcctgctaatacacagtgagacaccattgctccaccaccgtctgacctccgtcggcacgtaggccttgctgtactggcgtcccccgttggccaacctctatgtgccgccacacggccaccctcgccggcctcctacgcacgtcctcacgctcgcgccgcgtcggtctcgccatcaccagccacgcatcttgcgccatgtgggcctaccgccaccgccgccgcctgccgcgccaccttgccgcacgccggagatgaactaaatcaactaaaaagaaagaacttgtaataacgatttaggataaaactaaataaaataacttgtaatattgcaacatatagaacgcggagggactaggactatgccgtaaagcgtaagcagaatctttgatagttgacacccactcgaggttacgcggcatatccgactattcgtcggccagatcgaccgtgagcacctgacctgactcatttggccattagccgggccggataagctcgcaggttggttgccgaaggtttgttggggttgattggtttggttaggcattttggtcacgcgcaaccgcgcgctggggaaaagcgacagcagcgcgcgagtagtacgtgactgacgcggtggagctctccctgtgtcagtgtggggggcggggctatttatgacgacgatggcggctgctaaacaacagaggagcaagatagtactccggtccataggcttacctatctccattttttcttgtccattttcgaaatgatgtactaggtggtagtactgtctgccagttgtgccactcccaatcagcctgataaacatgtttttcaggctaaacgatgcgtcaacattagtctctgaatctgcatgcacgttttgctggagtatgaactaaggacagatgaaccggaaattccgtaaccataacacatgccatgcgtaaactttaagttgtggctttagctgtagggctgtgcctatcagagagtcgatacaatgatagattgattattttctattgtggggatgagaatttccatactttcggagagatttcgaccttcatattattctactaccttgtctatacagctgatggttggtagtcttgagatttgggagcctgaggcatgctagtcattcaaccaataatgccattctctttgttctaaaataaatcaatttttataaatttgggcttaagatggagggagcattggatacataagtacatttaaccaaaaatttagactgacatggtattttatgattcagtattaacgagcctaacagagtttagtttagggatacgtgtttgcctctcaaagtatagccggtccatatcattcaactaagagtatacttttatttcatttctttagttcatattgatagaggatcgtagaccaaacagtgatctgagcaatggttcatagctcggttgttaggtttcttttttcttgtgatgctaactaggttaaaatctagatttaacgtgggtgtttatattttcttaggttattggtagtatatacagatgtgaggttttacacttgtcactgacaagtggcaacatgggttctttgccaccacacaaaagctttgcgtgtttagttatatcagaagcaacaaatgttacttcaaaagttaggactccaatgtgaaatacttttttcgtcccaaaatataacaatctaatttcggttctaagttgctatatttttaaacatatatatagagagtacttccttctaaacatgtactaatggcttgttcactttgataaaaaaaaaatcttactaaattttggtatacttgctaaaattttagcaggatttcttatatacttaccaaaatttggcagcaaactaaatgtagccaatttttttttgtgcaattttactaaaattttataaggttgaaaatgacatcaaagtgaatagaccctaaatatgcgcattagctgcagctgaacatagcaagacagatattatctatccaggatctgggaacagcgaacacagagaatatctatccaggatatataggaaaaggacgcctccctccactcacatccataatggttggttattaggtttaacaaaccaaaatcaaattcgatttcgcatgtactgcctgggtcctaaaatatagtaaattttagcatttggcattagtattaaagataggtaagaagacttagttgtctttttggtgagatatatgtccgaattagttagggcaatatatagtaggggtagtatggatagtttagtggtaagagtcaacttttataagtatatcgttatagtttgattaaaattttaactctaaaagtttgttatatttgagacggatggattattagatattactccctccatttcacaacgtaagtcattctagcattttccacattcatattgatgttaatgaatatagatagatatatatgtctagattcattaacatcaatatgaatgtggaaaatattagaatgacttatattgtgaaacggaggaagtagaaaccaaagcaaaagtatggttattgctaattatttggttctattggccaaaatagaggttcagaaaagtttgagtgcgtagccttgctccactctcaagcttagcagtacttatattgttgaaagcatgtgctctactatgcatccagaatcgaaaagaagcgaggtcacacaaaatagaacaatggctcagtaaatagagctgtcacacaagtcacaacagcaacttacaacccagagggaaaaactaaggacctgctctgcctaaacttgccatgttgaaaaattggtagcactagcgctagtactgagctactgatcatttggtttattgccattaaaaagttggcattgataaattctggaacccaactaaaagtctaaaacagtaaaaatgggccacacttctgaaaaaacccaaacggacactcttgacaaattcttttggcaatcgccagagtttgtatcggtgataaaccaaacaagcctagcatgaaccttaccaacattcataattcgaaacatgcgggcgaatgagattgaatcgtgttacaaatgtctaagggcctgtttggttggtgccctgagtgatgagcctgagaaaaaagcatgcctgggtggaagaaaatttataaaatgttttccctgatcaggcatataagagggtttgttgtttggttggtaccctggacaagaaacgagcctgagagcatgaaaccatgtgaaagcaaacaagaaaatataaaatattgcattctcaaccggttagtacaagtaaacattctgaaatgacgccatgcaactagaatattccaacctcacataatctaccttctttaattcggttgcctgagtcaggccacccaattcaagcgcctgagcctgagcaaccacgcctgtgtccagcaccttctcaggacttgaaccaaacagaccaatgaaaatgtcaggcaagcttcagctcaggcgaatttgcttcagggcagcaaccaaacagaccctaaatccctcaggtacccactagaaacaatgcattccacgttctgcttgtgaggcaaggattgagtcctagcacagggaccacatgcactgccaaattgactctgtcttgcatatgactgcgccacaacacagtgaaagcaagacaaaccaacaccaacacatttatcaaaagctcttcagaatgtgagaaaatcaatataattgctcgtttcatgacactgtcaaaaatatggggacaatgataatagcctgaaaaaatgatgattgggggggtaaacctgatgcttcaatccattcttttttcgaatgggaaaaaggttcagttccattgttcatttgatggcatttagccaaacaaaaaaaagagaagaggataaattgtaatggcaacagaaaaaaaatggccagagcagctgctctgaggctctgagaaaaccacacaacaacaatttccattcaaaaacagcagggtgaatgaatggaaaacaaaaagcataaccatactactgctgctactgctacttcttaatgccatagtgcgcatattcaggagttaacaagcctcctgaatatcaaataactatagcaatgttcatagtgaactatagtttttaggtagataaaacatcaggtcctactctcccaagctgcgtttgatctacgaattcatatttcctctctgttgctgaagagcagggtcatcgataacacacttgtccagctgcagatctccatcatccagtgcctgaaaatcgagctcccagaatttttcaggcttattagccatctccatcagatagggatcactaacaagactaccatatgcttgctgactagtgccactgcaagaactttgtaaagccgacgaagcatcgacgccccaaattcgctcgtcatcatctgcatccatcaatttacccgctgtttgtaacatggagtcagaaagcatccccatattgtcagaaaatgatccgaggcaatcagcttcagaagaggtagcatccaatcctggagacaatacattctttcccttggatctgccaatcgtgggatcttggccacgaggaccagaagctggaggtatttccagtagctcaactccgctaccaagctcaagttcctcctgtgtgtcaaatccctgaaccaacgccccgatgtcgtctggtgcttcgattccatcaagtcctatgttctctggcagcatggcaagattgaggtccccatcttccaaaagaaaattctgaaggtctaagatgtcactgtgcgtggctggaaggtccagggacgtaggggagaaatctaaattgctctctccagtgtgttgtgagctggactcacctgagtcaatgttgccatgtggtacatgcttgaggaatttccttttcactctggtggagtcgatttccttttgctgtctgtgcatcttaagttgcctcaggaaagttgggttctggaggagcttggccaagaaagagaccatctgtttctgccgatcttccgctgattctagcctctgattcagcgtgctcatttgttcaattgtctgaaggtgctcttgcttcagcctggtcacctcctgaagcaatgcactcttctcccttctcagtgtgttgagttcagggtctaaaccggattcaccagaagagccaggctgaagaccactttgttgtgttggtgaggacctgcgccggacaatcttcttcaacaaatgtttgctatgtcgtaggaaatcctcatgagcaaactcccatctatcagcatgaaccttgcgaaaaccctgagtacatcacgaaggaaatcataacaggaaaaaagaggtagcatataggaagatctaccatgattgtgcagagcagtacaagttagcatgaaagcattcgacacggattgcaattggtgcggtcaaaatggcaatgatgtgatgatattgactgtcatcgacctacctaaactctaatactctatcaacaaattattttgcactcatcactgagcaagaactgaacttataaagaactagtagtctcctaacctgactgtactgtcttacaaagaaactggctgaatagatgccagtgcaactgaaagaacaaccaaataactgtagcatttgttctcctatttagtccccaacttgaaaactagggagtaatgagtctagaatttatgcctattgaaccaggtagttgaaaggactgacccaaactgtgcatactcacacactttccccttttaatcccactaatagaaaggaaataaaccttgtcctaaaataaccaaatcatgagttgattgaaataagttagccaaaaagactgcaccaaatgcatactgttctatgatatatgaaatgaagtgcaatacaacaacagaactgtgcaaactgccagaaatgctgaatgaaatttagataggaactgcgcaaacatcggaaaacaatcctacacctgcactacaccaaacctgtgagggcagaggagctggaagaacaggcatatccacatagtgcggcacaacaccgaaaagaaaagggaaaaaaagaacactgcaacatttgacagggcaagaaggagcaaatttcgcagtacaatactattactatacagaccaatcctagatcctacaagaattgcaacagaactgcgtatgcacatgtggatcgtggagcttacctttcaattacgagagcggcgaattccagcaaacggattaagcttgcccatcacaggatctattcctcaggattgtttcgctcatcatcttaatccagttatccattttcgagttacatttcaagattccgcacacaaaagaaaaggagcagtacaaactccacatacatgttcaatttacaagatactatccaacaccaagagggggaaaaaacccaaaagaacacgagagagagaaaaaaaaacaagttgcaaatcagcagcatcttcatccgcattctacagctcatgagtaatcaaaacagagtaacaatggaaaacagagtacatccatcacgagcagatcgcaagaacgctggtatggaacgggagatggggaaggggcggggattttgatacgcacataggtgttgagctgccggacgaagctggagaagttgttgtgcttgaagtggtgggggagcacgtcgcgcgcgaaggcggaggggtcccagacgacgaagctgttgccggcgtggccccaggagatgaccccgtccagctccggctcgcacaccaggtcgtacgtcttggacaggaacggcggcagctgcggcccctgcagcagcgcctccagcggccgcggcggctgcatcagctggtccagcggagagacgaacggggccggctgcagcggctcgccgccgccgtcgtcgtcgtacccctccagcttgggctccagcagcagcgccgccgcggcgtccaccatggtggtcggaggagggtcggtgttgtggtccattgtggaggaggaggtggtggtggcgcggaatttataggcttcgggttcgaaaccgacatactgtgcgagggcgacgggcgccccgcgtggcgaggcgcgcgtgacctcctttttggcaggtgatctcggcggggcccggaggctgggataccggggcgcggcgccgctggccaccacttggcggccgcggcgtacgcgcgggaggggaggcggtggctggccgaaaatatccggtgagatcgggcgccgcgtcgggtttgcttggtggcgaagagaggatatggattgcgggggggatattttgcagcgggctcggctcaggtgggcggtgctgtggccgcgtggagaggaggggatgggccagcgagctttgggggaggggtgggggcccacgtaagctctggccccagctggcccagcgtcgcgcaccgggtggatggaagcccggatgacgtcagcgcgcgagtcacgtacgtgcgtgctcgcgtgcggcgcgagtgtcccacgctagcgggaaggcgacaaacacgcacgctgctctcgggcggcctctcgctgaattaaatttgaaaatatactatttatttaatttttttcttataaatatttgggatgtaaattatttttacggaaatataccatcgatctcacacaaccgttacgcgaaagtaaagtgggcgtgacgtcacgagtggtatcgcgtggtaaaagtacgaggcacgaggccgcacggtctcgcggaacgaaagagcgagaccgttcggtattgccaaatcaaacagtgacacagtccaacagctagtgcttaattacttaattaactaataataattagtgattaattaaatcaataattaggataattagccgctaattaaatcggcatggcaccagtatcgctgattgcttgagcgaggtcgttccgtctggcaccggtatcgataattgcttagttcggtctcgcgccgtggccgcgctgtcttgcgctttcgccgcgcgattccgcccgcgacgtcattaccacgtcatctcgcgtaacggttgtgcgagaccgacggtatatttctgtaaaaaattttacatcccgaatattcctaagaaaaattaaataaaatgtatttttttaaaatttaattcgtctctcactagcccccttaagcgggggccccctgatgggcgatcgcttgcctggagatgggggcagcgatcaattcgcccctcctccccctccctccctccctccctcccttcacctggtttccttttttggcaccgcattactttcctattttagtaaatttatgcacctaaagtttatacacctcaagtttatatatctaaagtttagagaacaaaagtttataagtcaaaaagtttatatatccgattcaaattttttttatatatagtatttctatacatctaaagtttatacacctaaagtttatagaccaaagtttataagtcaaaagtttacatacccattttaaatttgaatttgaattcaaattttttatacataaatttttctaactttttatttttttaaaaaattttatggtgtactgtaatagaaagagaagaaaggggagaagagagaggagcacaggaggaggcgcggggtgatcgccagggcagcgcggggcgatcgcggggggcagcgcggggcgatcgcccgtgctctagcgtgcgtgtttggttgcttttcgctcgccactcgcctgcctcgcgcgtagcttggcagctgggggagtggggttggcttggctcgatcggtgaccacggttttagtacatgacttttggtaaacaggtctgttgattgacatccttaagcccgaattttttttaactgtcgtctaatttttattggtatcgacagttatatgtaatagagatgatagtggtggaatccaagcaaccgtctgtcttgtccagaaattagctctgcctccgggtttgtttgctcccttctggaggtgttttagagatcctttgaatagaatgaattacaacaaattttgtaatgccaaaatttagtaagattaaaagcagtaacaaactgaacaggtccctagtaaattttgataccgccaatttgggtagagtttctatttggtttaaaaccaatttaaacccaagctttaagtacattcctgaaagtatcggcgctattaggcgtggcttgatgggatttttaccattaactagtaaaccgatagttgtatcttagtgctatgtctgttacagtgcaagtgtgtaaccacaggagcacgggctaccaaacatgcccattaaatcgaacattgacaatgtcaatgatttaggtttaaataaaaccaccatatacactatttaaagaaccaaatattatacccttcgtctcataataaacgtagttgtgggttttagtgtccaattttaatcaactgttttatttaaaatattgttatgattagtatttttattgttattagataataaaacatgaaaagtactttacgtgtgacttaacttttaaattttttaaataaaatggacagtgaaacgtttggcacgaaaacttatggctccacttataagagcaagtattataacaggctgtaagcagactgatgtctacgtggaggagggagaaacgaagagagagaactggacgggcgactcgtgacgcgcctgcttgaggccggcggatacgcgctactgccgctgctattggattaggctcgtttctgtgcattaaatactagtgggtccgttaccacacggtggtgatttggcgcacgttgcagctgactgccggcgaaatcattagccatgctctagtaatacggaaggagtagtagtatacatttggtacgaatccaaaggagccattaaaagcaggatcaataaacagcactcctacggataagacatgtcctggtttcgacacttggcatgagttaattaactacttctttcgtcccaaaatataattatttttagactctaacacagtttctgatatgctactttaatcaacaatgtctataaaaataagatgttttaaataaaaagagttgcatattatgatagtttgtttaatgataaatctagtaacatcatttttacatgattgatttttttattttttttgctattaatagttaaagttaaaaatatttatcttatcactatgttaaaaatacttatattttgggacgaatggagcaggagtactagatgaacaattcgatcagggttggtccaacaaaaactttgttgtgggcctgtactatgattttgtttatctggctgtctcatttgactagtagtactaagcatttaatttatttattatgtcaacttgacaccttttagcacagtgaaaagtaaaagttctcgtaaaaagtatcataaaataaatcatattttaaaatgagaatcacagtgaaagcaactgaaatgacgtggcgcctactactgggttaatcatgaaactggagagaaggtagggtatctcctactgagagattcggttggggaggaagatgcctaacgggcatcgtcgtgaaggttcaaaacaagtgggccgacgaagctagatgcgtcgagaatgggggagaaggctcctgtttgccgacaaaatgtttgcacctccagcagtgcgcgacgagccaacggacgagagaaccaaagctgctcctatattgggacgaaagggactgctcagttaatccgtagtatttttatggaaaaatcctaaaaaccactcacattccacctcataactaattttagtgtaaatgcctaccttctactaagttctattgtaaaaaaccactaaatactcgtgtttaatcgaatcagtccgttattaccgatgtagagttatcacagactaaactagctaaaccaatattatccaagtgattgctatggacttattcttcatgtttcactagaaaaagcgcatggcaaaagccatgcatggtataatgagcctaggccattgggccaagtggggtaccaaacgaatagaagatcttttgggttttgaaaaaaaaatctatttcatattacaagatgtttgggttttgaataaattcatatatggatcaatgtatgtgtagacgttttgggttttaaataaatttatgtttcatactataagatttttggggttttgaataaatttatacatggatcaacatatgtgtttcatatatgtgtttaaattcatatggatattagtgaatatagataaggggattgaaaggcttaaatatcttataatgcggaacaaggaaagtggtaattaattggagctgtgcatgcaaagtagggagtacggactactgaatgtaccagttcatgcatcgatcagcatgcaacgggtgtttgcatatagaacatcctacatttacgcataatatctcatttcatcatccttgtaaagctgggtctctctaaatcacccaacatgttgttgtgccatcgcacggcctgctgagccaggtctatgggcctaattgctcgatcgatatatccgcgaagaaacttctagacacccgatggccggtgcacgcacgcacgcaagagcgttcctagatcgctgcatgcgcatgcgcaagatcgtttcatcgagcctcttccgcgaagtcggtgttgccacgtggctccattctcctttctattttttcattgaattcgtattataagattctttttttttttacatatagcgaaactcggaaaggtaacgtttagactctgatcaacaactgtatttctagaatgaaaaatggtgtcaacaatgtactcctaaattaaaaggtaaagacatgacttacaatttacaaaaacatgttaatttgcttcaaacacatacgtgctgaagtggtcttttttaacaaaaaggggggttctaaaactttctggggttctaaaactttctgcaacagatttgctttgactgtttattttaaatcatctaacaggtttttccattttactctcgcaaactatactggataacttaacaccctaaactattttttccttattttaccactaaatcatttttagtgattcaatttattgcttaataatatttatctcctttatttctctttatacgagttgtagtttaagataaacatttttagaaacgtagatgacacaattatcaaagttttaaaacattttcaaaattgttcgtgaatattttctcggaatttaaaacatcaattcttaaatcatgcaagtgttttcaacctactccctctatcctataaaaaacaaccttatatcggatgtgacacatactagtagtacgaatctggacatactaggatgcgtcacacccggtactaggttcgtttttcatgatacaaaaggaatatgtaaatagtgataaaaaaattctaaaaagtattgagaactactctctgtgtcccattataaatgcacttctagattcaacctttgttccaaaataaatgcaattttaccatactacttaccgcatcaatcgcatctcattcaaatttctcttcatcttatcctcaattaccatcccactccctattgtcctcatttaattggagcacttaggtaattttctctccctcttacccttaactaccctcccatttcctaccatctctaatttaatcaaggcgtttgggtagttttctccctccctcctaaaactcaatcgtaacaagtagaaatgaaaaagagaaataattttggggagtaaattggaccattttcaaaagtttgggatgtaaaataagctgaaaaattacttagggggttaaggcatgttctttttagtaactccaaccgaccacttcctcgttttccattagcacgcttctcaaaatgctaaacaatttgttgagtaaaaattttcaatatagaaatttatttaaaaattaaacaaatctatttttcgagtttacattaattaataattaattaaacatgtactaattttccgcaaaaaggtgacctctaacttcaaaatcaaacacgacataagtgcttcagcgaaatagttcatgggaatataattgacttttttctcatatatatataattcttgtctataaaacatacaccatctgctttatattttaagctgtttcctaataaaactttttaagattgaccaagtttataggaacatatcgcaatattgtcaacacaaaacaaacatattatcaaaatatattcaatgttacatctaatgaaactaatttggtgttgtagatgctgctaaattttttttataaacttaatcaaatctaaagaagtttgattagaaaaaaatcaaaacaacttataatatgaaatggatggagtagatcattcctcagcattcatccgtgtttcatcttatttattcggagccaagtgtgacgaaaacaatgccaatatatctaattatgggttcttcattttgttaccacagtcaaccttactaaattttggtaatgctaaatctttttactagcagcgtttgttttagtttgaagtctttgctaaattttcaactactgtgagcggtctaaacttcgacccttctttctttcttcatttaaaaaaaggggagcaaagcctgttttttgctccctcaattgatagatcagggcccctcctgctggcccgaacgatagagttttaagagaggaagtgtctagaactaccaaaatttgtattaatggttgaagcgtatttgatttgctatttttttaaaaaaatgaaaatgacaaaaatttagtgtggttggaagtggtaacaagcccttaatttcaaaatcgagctgtaaaattcaaaattggctacggtcagactcacagctcaaacaagcacgctgtttttctttcttttccactatgctgcagttgttttctgccatcgctatagtcagtttccgtccttcgaagggtctcccactccgaaccgccggtgggcattgccattctccagtctacaggaagtggatcccctgactttgctatgcaaaatcatgcgtgtgcagttctatcctatccaccgtccgttctcatccgacggtgcacactcgttgccccaattcctttcttcttcttgctcgcttcattcggtagtttcttggcccgccacggccgccatcatctgctcaaaaactccttccatctcgtaatcagcgacacgaaacacggaaatggactaaccgttggcaaatctttcggccttgcacctcatcccggtctctaccttcttggcatccgaatccagtggtgcagccgtgtgcacagagatgattcatctcgacgaagcgatgaccggaacatttgattatgaaatgtgccttacgatatacgaagtcttgttactgtgatggtttgagtaccagtgagagtccgtcaattggaagaaaatgctcgtattgcagaaggtgatgttcacattcggtgctttgggtagaggtcgtgcaaagggagaagcttttactggatttaccaaccacctatcaccattttaattgttacaacgacaatctgactaaaatagcctaaacctttccagcagctaaaattgcgatctggttaggagtgacggtcatggcgcctggcctcgaaggtgaaggtgcagactccagagcgaagggagcaagaagaaaggaattgagaaataagagagtgtgcaccgtcggatcagaacgggtggtggattgagcagaactgcacgcccgtgactttgctatccaaagtcaggagatccgtttcccagtccacaacatcacatgctatgggtgtaaaaacaagaagcaaaagaaaaaaaaacaaaaaaaacatcacatatgctatggccgaataaaacggaaaggcacctgatgcgattcagtagcaacttgcggccaaataatagccgacctgaagtagatcagacatggggactagggctttggacctgagctatcttgaccatctttgatacagcaaagatcgtagttgtttggcgcattttttttttttttgagaactcatgcactttattaaaagaaagcgttttagaaacacaaagcatgagttacattaactgctccattaggagtgaaggaaagagctcttttagtaggacaaacatctctggaacaaatgtgagaaatattagagcaatcaaacattggtactgaggtttttggatactttttcgcttccggagagatcagacaattcctccctcggcggaaaagttccagcgtgcagagaatgaaatacaaaggatgagagcattctacggctgtgttcgcaagtcaagttttccaacctccgctgtctcatttcgtatacacacgtttttcgagctactaaatggtaaaaaatatgtagaaaagttaatgtaaaaaaatatattaatctattttcaaatttttctagctaatacttaattaattatgcgctaataaaaaacctgttttccgtgcacgggagagaggtttccatccccttctcccgaacacagtctacgagtagatcctagccacaggtatttttggaacagatcatgtatggagcacttgggacaggtttgtataaagcattttacatgttctgcagcattctcttatgtaattcaaaccttcttgctgtgcactccctcctcaaaaagaatgcaattctgcattcgaaatttgttgccaaaagaatacaattctgaagtactactccaatcattcctcatttaaatttttttctcaacttatccccaaccatcctcacactccttaccattctcctttaacgagggtatctaagttattttcttcttactgatttgccttttagacgccactattgtacttgtatttttttttgggtgttttacagtaccctccacttatacgtgtagtagtgtagtaggattaccgttttttttgacaaattgacccttttggaaaacttatttcgaaactaacccctgccaaaaacttcaaccaaaaataggccgtcgcctcagcgccaaacacattggcgctgacattggccgtgtcagcgccaacgggactggcgctgacattgtgccaccgtggcggccgggccgatccccagctgacgtggcagctacctcagcgccaaccggactggcgctgaggtgggacttggccgcaacccctaaggcccagaccagcaagccttctggatggcttgcgggctgggacctcagcgccagccataatggcgctgaccgtgggacactcagcgccagcccacctggcgctgaggtgggacttggccgcaacccccaaggcccagaccagcaagcctgctggatggcttgcgggctgggacctcagcgccagccataatggcgctgaccgtgggacactcagcgccagcccacctggcgctgaggtgggacttggccgtttcggccttggcccagcccagcaagccttctggatggcttgcgggctaggacctcagcgctagccataatggcgctaactgtgggaaactcagcgccagtccacctggcgctgaggtgggccttggccgtttcgagccttctggatggcttgcgggctgggacctcagcgccatccataatggcgctgactgtgggaaactcagcgccagcccacctggcgctgaggttgggcacctcagcgccgaagcggttggcgctgaggtagctgccacgtcagctaggggatcggcccggccgccacggtggcacaatgtcagcgccagtcccgttggcgctgacacggccaacctcagcgccaatgcgcttggcgctgagccgacggcctagttttggttgaagtttttggcaggggttagtttcgaattaagtttttgaaaagggtcaatttgtcaaaaaaatgggtaggattagatctgacctttgatttttgggggcattttagtcattctcttaattttagtggaagggtattacagtaatttcgtcttccaatcgttttcactgttcgctagacccgcattcctctgcttcatccgccatctgcgcatcgcctcccctcccctccacctattgtgcgcggcgcctcgccgcccatccctgcgactcggtgcgccgccgcgccacccctccaccttcgcgcaaccgcgctggccctcacctttgcgcgacccgttgccgcccctccacctccgcgcggtcgcggcgcccctcccctttcgcgcgagcgcgacctggtgttcggcgcgtcggcgatcccgtcgtggcggacgttggggttcgtggagtacatcccgtcagggaagaagcaggggggcatggtgctggttgtccccgaggggagctacgcggtgcggctcgggaacgaggcgtcgatccggcagcgcctcgccggcgcggcgcgcggcgcgcggtacgcgctcacgttcagcgcggcgcggacgtgcgcgcaggcggagcggctgaacgtgtcggcgtcggggcagtgggcggtgctccccatgcagaccatgtacagcagcaacggctgggactcgtacgcctggacgtgggacgccgctgccaacgtgttcgacgtcgtcatccacaaccccggcgtcaccgaggaccccgcctgcggctccctcatcagaaacacggttgaaaacagcttccagatagtcatatataaaatgtggaggcaatggctgacagaaaattcaaactcggtttgaattttgtcataatttagctagatttcaactgggaatgtactgaccgtgtcgaaaaaaaaacagtcagttttttcgttgtgatcacataaattaaacaatatctgccattttaggacaatatatgtaatgtccggattccatccgatctgtctagaccgggtcggcagccaaaaaaacatgtgttttttcatcgtaaagacataaattaaacaagatataccattttaggacaatatatgttatgtccggattccatcatgtatgttcggactgggttggcaatgaaaaacacgtcttttttgtcatgatcacataaattaaataagatatactccctctattacatgttataagacgttttgacttttaagtttgaccaagtttatagaaaaaatagtaatattaacgacctaggatgaatttattataaaaatgtatttaattattaatttaataaaagtaatttggtaatgtaaatattattatatttgtttataaacttaatcaattaaacttgaatcagtttgactttgatcaaagtcaaaacatcttataacctgagaaggagggagtaccatttttggacagtatatgtaaatatgttacatcaagattctaccaggtcgcaaccaaaaacacgtgtttttttttcatgatcacataaattaaacaagatctaccattttaggacaatatatgttacgtccggatttcatccgatctatctgaatcgggtcagcaaccaaaaacacgtatttttcgttgtgatcacataaattaaactagaactaccattttagaacaaattatgttatgtctggattacaaacatgcgaggaaccagccggtccgaacatgcgaggataagatgcttgtccaattttattttgagtccatgtattatcggctggatcagtggagcccatttaggagtttgagtccaagtacgtacatctggcccagtgctttgggaggcccatcttattgacagcccaggtgatgattaatctccacctccgccgtcaaccacaggcgaacgccgatctggtcgccgccgccagtcgagacctccactgcatgcaccacatccagcacgatctgcaaccatccacgacgaccaacgccacagccacgaggatctgcagccctttttttcctcgggtatatgttaattaatcaactaatcccaaatcgggacgtagaatcaattgagccggccctattgcagtgcacgcgcaattacataatacaccccatctataatttttccacagtcacccttgtactacactactacacccttatactaggtgtagtaacaacgaatttccacccttagatctcatatcttctacggtccatatttatttaaaggtacactaaaaaaattcattttttttggaccaagggagagtaatttgaaaatagactggctgtttttgaaaaacttttagtgtgagttatggtaagggaatgctttgtgattgtgcgcgtgatggtaagtggtaacagcttttgaggatctccaacatgagatatgaccaggtacgtagaagttctccatcgcgcctttctcctaaaagtactgtatttttctaatggcgagcatccaagcagcatgatgtaataattccaaatgttatagaattactgaggattgaacaataaatgacacactaatccagtgttttactaatgtattattttttttagaattccatgttttaaagaggctagtggtacgatgggtttaaatcctagtgcccacaaatattacaaacatgcaagtgagctttcaatggagatgtaccgttggtttcagtctcttagagcatatgtacgaggatgcattcggaatgtaagtgttgcattggtgttgcattgtgtatgtagtggtgtgtgcgcgcgtgtgtctaccgtataattaaaacaaaaaagaggctaaaaggatttttgaacaaaagatagatggattaaatccaaagataaaatatgttgtgaaaaggttttgattttggggatattgtatcgaacatttccataaacatctttacatacacagacacacagtccttttcttctcaaggacaatttagacagtgctagggaccaaagacaatgcaatggaatttcacaagcaatcatactagcaacagcatgcatgaacaatacacctaaaagcattaactgaggcaaaaaaaaaaatgatgggctttatttaaggagtctgttcattttgtatgtacggtatagcatggtatgaatatatacattatcatgaaaatgaactttaccagtgaaataactaatttagccgtccagggaagagatataactataagcttaaatagctttcggagcaaaaatattactgacaataatcggaagccaaaagaaagaaaaatgtctgaattcaaacctaagaagttaacgactaagatagctagtcacctttgtaagttgtcaagggctcgtatcttcagggttttgaaggtacccatgaaccgttaactgatatcctcttgaagttgatggggagttctgattagaggtttcagggattccatgatactggcaaaagacggtcgtcgccagggttctctgcaaataaaaataaaatattcatcaaaccaacttggctacaagttgtgagaagaaacatataacagtatattatagatactttgtccagcaggattccattattgccgccacttttggatcaacgctacttggaatttcaagccttcgcccattaaaaccaacagctgctacaacctgcaagtgaacaggtagactttgttcaattcagttcgtccgaagttggaaaatatccgtgtgatgaagaaaacaggagatacaaacctgagctggattcaaagtactccatggttgttgcaatgtcatgagctcccataggataacaccaaagctgtagacatcagacttctcatttgatggctcatctcgtataacttctggtgccatccactcaggctagagaatattacatcgaaagcacttactagcacgatttagctgaaaaaaaatcaacaaataaaagtaacggtaatatgaacttacagtccctgctgcagtcttggaagacaaaaatgtgtttgccttcaatctggagagaccaaagtcacagacctgcagcattgtaggggaaatttgttgttagttggagataagattaaatagggaacaactgccaattatattagaaagaaagataatcctaatgatcataacaactatacccattcaagtagaaaaaataataataataaagtaccacatagagtaattgaagataaagttttctcataaaaggggaaacgccattggtgtggtggcggagtcatgggtgcatgattccacccactagagttcaaattctggtgtccacaaatatggccatgtgcatctttggttaaaaggggaaaaaccattggtgtggtggcggagtcatggggcagaggccggaagttatactttgtccaaaaacaaagtagaaaaaataacaaaaagtaccacaaagagtaatgtgaaatcaaacaggtcttaaaatatggcaaaatgggtaaaaggatataccttcacagtgtactttttatcaaccaacagatttggtgactttagatcccggtggactataggaggattgcgcttgtgaaggtaattcatccccttagcctggatacgaaggtacacaaaatcaatgatttttataaagaagcacctacaattttgattctacggtcaacctttactttatataaagcatatgtccagtcattctgttagacctaaattctgtattgagataagtatatatgattttaccacgtcaaaagccatactcaatcgccgcttctcatctagattttcccttgcaccatgcttgtgcaaaatcctgtataggctacctctgcattcaagaaaaaaaacttatgtgggaactacaagctagactagaggtaagcacatagtttacatcaattttgaaatagtaatcagaaagttcaacacaccttgatagatattctgtcacaatcgaaagttttggtggctgagtaacagcacccataaaaaggacaatgtttggatggcgcagacttttcataattgcaacctacagaggagaatacctaacatgttaagtgacatggacattacatgattaaatcaacttatacatgtgaccttgaatggggcaacatcttaacattctctgttaaaaaaagaaagaatactgggcattaactttgttgcagaggaaagatcagttcagaagcatctagtcatgcacatcgttgtataacatgtccattatatgtaggaaaattcaaagcgctgctgctttcatccctatcagatttggtagtcgcaaaggaagaccaatataaattgtccactggaaattctgatgttatacctccctaagaaattctttgagacgctctgggtggaagtcttgctccatcaaaatctttacagcaacatcctgagacatgaaaggcaagagtgttaattgagctctcctatcctcaattcctcacatgaagaataagtacataactgtgggacggttgagtgtttcaggttattgaaacaacatttgttaacatctctcctaaaatcatatattggcacaccaaaaaggaaatacaggaggcgtagttgtatgcagtacatgttagaccggtcactattcaagtagtaacttgtaacacataagcacactgtaaaatgtgcttgtaataaaaagagacataccgagccattccaatccgcacggtgcacggttccaaatgagcctgtcatttttctcaattagtgcacactacaaaaatatcaaaatctggaaataggcagcttcatgatcattcattaattttcacaatgtgaggtcacggatgtccaaaatattcaacttgttcaccttcgcaaaatatgtgtaaaataaaaactgcatgctattaatttgccttgcgccttgttctagccttgtgcataactgtggtaaaactctagtgaagaaggcacctagttctagccttgtgccttggatgcgcataccgaactttcagtaatttgtggttttgtacaagattggccctatttaatatcatgcattggtactataatccatggagttaattgcaaatattctttgtagtctcacactaaacgttgtggttaactttcattaataacatgcttatgtaattagtagggttagaagaggctaaatgatacaaaagaatgcccaatgtcactcttcattgtacttgctcatgtaagccagaacaacttgctttattgattggaggttgtatgtggtatagagattttttttttttttaaaaaaaaaagctaagccagaacaattcgttttgttgattggaggtcatgtgtagtataatagagataaaaaaaactaagtacatcgtacaaaaacactattaaaaaacaaaaacgtaccagctccaattttctctttcaaaacaagttcactccaaggaataatcaagtcttcaatgtcgagagatatatcactgaaggggtcactttgtgcagattgtgtatcctcaggagaactgaaatattcatcagtattatcaactttggatgatggaaagtggaaataactataacaatttttagggaggatcctgctgatgcacctcttctgaataagaaaattgccatcttgaccactggactgggcaccacgactacgatgtgaaaagttagcttgaaaatcactgtttgttgcaggcgataagtttggaccaatatttgatcccatggcctcatctaagtcaacaaccgtccctgaaactattcaaaatagtaaaagacacaatcttttgaaaagatcttaaatattttttttagtcctgctttctgaaattccaattcaagaattgaaatagtgatgataaaaaatatcaattggtcagttactcagtttgcttgcttagaatagtaggcagttcattttccatcttttcttttaaaacttttgaagaccattcaggagaaaatgactagacctgaattgtgaaactacagctaagaactattgtaaaccatactatttcatccaaaaaagttttaagttttaacatctaaaatgattgtgctgaaagattgttgcctatatcaaaactagatgtcaatgacataaagtttctcccagcaaaaaaaaatctaaaaactatctatttgaacatagaacacaacatgctcacagcagcatcagctgttaattttaaaagtttaataatgtcaaaatctcttcctatacagatcagcccatttgagatattactattaatatcacatcatgtgaagagtacttaaataaatagtatttagaagacagaaaagtatgatctgacctgctgctggatcattgaacatcatatttagcgattggcaatcaaggaaatattgcttcgccaatgacttgaagttattaacaatatcagctgaattgtattttggtgggcgcaatggtgaagaaactgaaatggatgagagcccatttaagagggagtcaggttcagataagaagcctgggttccctatcaaatcaatcagatattccctgataccaaaaataaaatagaagtcaagaagtgattagatgctatttcaacattgaaaactggagagtgtaaaagaacatagaaaactggaaaaataaagaatattcggagcaagattgtacagataacttgagaacataagttccatttatattttttccattttcacatttataacaatgttataccctctttctatgacattgttagatcagacaaggaatgtaattggtgtaactggggcacaattctttcttcatattctctctcttttttaacctttgatgacccaaaatctgtagaaatagtgcaagtcattcatcaggattacaaacctgtcattaccaaagtgcaccaggcatgaagcagcaccagcagatttgcagtacctgcatcccctcacaactcgacatgggagactgatagtgtctgctaaggtctttccccaccaaagaaaacagaataggattattatcaaaaacaaattgaagagacaagagagtatcaggactggcaactaaaatgaaataggatcataagaaactgatcttttaaagtagtgcagctcctatgtatgcttgtgagtgcatcaatatcactataattcaccatctaatgtattttagggcaatcaggaatattgcatgatgagctttgtaaaatcataaaaacaaagttccagcgctaacatggaaaatattgccactaaatacgaagatttaatagattttagaacatagcgatagaagcaaggtgaccttaaacagcaacgatcggtgccggcaaagaccgattgataacttcccaattggaagcacaacagaacctgaactaatcttcaggaacccggcagagtctctccaccggggacacagttcatgttcttcggtagatgctacggaaccccttcaacattagtgagacacatgtaagacagagaaaatgtaccaaaagtggcaatttccttatcaactcccagtctctcaccccatctttgaggacacaatgccagcaaggcgagtggtgatttcccttgagtcagcgcggctccgagaaacgtcaatcgccgtgcttatcagttgcctcagatcatagtcgaccaccctatctatgaggaccacctccacggatgactcggtgggattcatagccttgagcgactcgatcgagggcactcgggcgccatcgcgcaagtcattgcagagcgtccatacgaagggatccatcccatgaatgaggtagaagccatccaggaccttgtcggagtaggacaagctgccattcacctgccaagacagcgagatggtcacttggagaatcggtatacatctttcggtgaactggtgtgtgcgcgcggtgagtgcgaacccagaagcgatgcgagagggattggggcgagggcgcgtcgcggtggtggtcgtcggccgccgccacggcggagtcgaggaagttggggtcgggggcggtggaggcctcggagcagagacggagcgcgagggcgagctggagctggtacgcctcctccgcctgctgcgcccagctcttgctgccgccgccgccgctgctgccggccgggcgatcggcggggtcgccgcccttgtcggcagtggcgagggtggagacggaggagaagccatccccgtcgtcgccggcgctgctcccgctcgagtgccgctgcagccgcagccagtccgccacgccgagcccgcgggacgcgtcgccgtcgtcgcagtgcggcgagccgccaccgttgccgatgctggcgggcggggaggtggcgaggaggctgtacgccacggcagcgggcgcggcgggcggaggcgcagaccctggcgaggcacgcctcccgccgccgccgccgccgccgagcaccatcgcgggccacttggcgtcggccttcatcgtctacccgcgctgctgcgtcgtggcggtggcggagttgcgctgaagtcgcatgtgcgggagaggcgatcgaggcgtgggcgtgggcgtggccgcgtgggtggggattccttcgcggacggagttgtcgagacggacggcatggccgcatgacaaggaggggagaaggggaggagagggggggggggggccgggggcggcaagcgcacgcgcgacgcgacacgggcagagagatggcggggggtgggcaagtgggggcgcgggcgcccccatttgcgcagtgcctccgctccggtgcactgcatttgcgcgatggcgacgaacctcccgcactccggtgcattgcatctgcgacggcgacgaattggagatttggagtgcacggggggccacgtccacgagtccgccacgacccccacgaccacttgctctccctcccggcggacaagtgcagtccaaatattcgaaattacgtcgttatcaaaatagggttaatcggatatataccattacaaatttactagttttgagaaatatcattacaattcacctaattggaaatatgccattacaattctgcttatgtctgagacatgccattttctacaccctgtagatccttggacccacatgcagaccattgtaatttcgtatagcccaaaatgcccctgtctccacctcactgacatatgggccctgtcttccgtttgttctctcccacagccgagtcttctcctcttctcttccgcgtcgagctccgaggccgccggccagccgcgctgaaccatcatcccctcccgagctccaacaccgctggccacctacttgcccgacgccgctggccacctgcttgcccgacgccgccgcccagcccccccccctcccagagctccgacgccgccgcgccgagctctccgccgcttttctcctccttcccggcatgctagatgaagcggcacaaagggcggatccggcgaccacctcccgccctaccttggagagctcgtcgaccacattgagctctgatgccgccgccgaccagaattccaacccccatcaccgagctcgcgcttggatctagcgaggtggccggactccatggtggcggcaggtggtgggatggagtagcgcacggggatggggcgtggaggtcgccgttgccgtcgccattcccgactactagccacgccagcctcctcggggggaaccacgtctgctagtcgccgtcgccgatcccgctaccatcctcctccgtcacttccgcgtcctcgccgtcgccaccacctgcaacgcgctcggtggggccgatggtctgccactaacaaggccgcaactggcccacaaacggcggaagctagggcggtggcggtggcgcaagcggaggctggggtgtgcgacggctgtggtagttgaggcggacaacggcggcggatgctatggatgaggcccacaacagcaacggaggcggaggatgtggcgcacgacggcaacggcggagactgcggctgtgatgggtgatgatagcaatgatggagcttgaggatgaggccggcgacaacgatagaagctggaggatggaggtggagttggaggaaagggcattttggtcctatatgaaaatacggtgaccaaaaacgttttaaaaattgtcccatctacatagaatggcatgtatctaattctaggttcttgcagtggcatggttctaattatcgaatagtaatggcatatttcaaaaccacagaaattataatggcatgaatccaattaacccatcaaagaataaggctgttttctataattggatccatttcattaaaagtttcatagttttaaaatatactattactccctccgtttcacaatgtaagtcattctagcatttctcacattcatattaatgttaaagaatctagatagatttatgtgtctagattcattaacatcaatatgatgtgggaaatattagaatgacttacattgtgaaacggaggaagtagtattcatctatttaaaaccatgtcattatacaattatagatgaatttgaaatatgtcattacatatccctttcgctgcattttctatccttttgaaggaccaaattgctccttcattcatccgcttcttccttccttgatctctctcgtcggcgaaggggtccaatagattgtgatgttgatggtgaccgtctcgtcggcgccaagggacccgacgtcacagggcacacaagtctgagggagcttggcattcctctcgctaagcccgccgtcctagcaactccccactatcgagcccaccgcccatgcgcatccccattgccgagtctgtcgcccctacgaacacgagcagagtgataatgtgcaacacatattcaatatacctcaaaataaaacttttcacattccattcatcatcgacgaagtgagcagctgttgccatgtcttctttcttttgatgattttttgtccataaatcagtagtagtggcaacacggctttgaggcttgtataaataattagtgatagcaaccttgttaacccaaataactcaatgatatcgttcctaactgtgtttttggacagaactttggacaatggttgcaatgcaccatgaagccttcgaaaactagcatggtctacaatagtaagtggtaatcatggagacatatcattagtgcaagttttttcctagcaaccacttgatcaaagacatattttcttatggtaaccctccttttcgtatttgttcctatcttcaaattggattgatttaaaccttttctagccagcctagacttgcaagttttaatgtagtctaaccaatttagtctcgttctactttctgatccaagcttgttgtgacaccatttccatttagtttttcatacaccattaattttcttactaacaaaatcttaccatgctatagatttcagcctcttattctcatattcttgttctaattatgcaccttgtgaatccataggttgttcttgttgttcgatacttggagcatcgtttggagtagaacacggagtagaagttggtgtcaatgcagccaaagactcctcggtggcagcagggttcggcattttgtcaaaaaaatgatgttcaaaacatggatcaatcaaacataaatatctctaagtactacctcaatatcccatgctacaaagtttatgttctgctcggaatctaaaatgtaccgaacaatgtaaaactacctcaagtgcagtaccaaatcatgttctatgtcatggggatgttaccaactaatgaaagaacacattcagaaatataaattgacaaatacctcctcggtgcatgaatgctttgctcgcttgtgcgcctactcgcctactggctggccatcctactcgcttgagcgtcgccccgctcgccaccctgctcatagccctgcttcgtcccgctcgcagctggcatgccacccagcttgccacctgcgagaaccatagtccatagatgcccgcctacgcccatcaccgtcgttggtttgcttggccgctggtcgcccggcacaacgacgtggggagaccggaggctggaccatgggagcggccatgtggtggtcggtgcccatggatgcgtagagtcgtggagaggagaggagaggagagcacatatgatggcggtggctgtgaggagaagtgcatggagggttggaggctatgatgatagggttgttaagatgctgagttaggttttagcttttatatcccactattactccatgttgggcttcttgggcttgcaatgagctgtattttgaggggtatatacctccttcggggcacacaggtggatttgctagacacttgagacgtgtgtggtggaaagaactagaagaacgtgcacgctcttgctgcctcgccttgcctggtcaggcagcacgcgtacgcgacacgctcatggatggttcgccaaaattgaggagaggcagcttccttttgcagttttgttttgctacgaaattcggtgtttgtttttttggaaatatagtttttcacacatattgaatattctgatgcgtggagcggcgtaaagtccgaataggttacacgcgacttatctgattcggttacgcattatggagatcatgcaggcgccctgatcactcttcttgttatctctatataaaccgagtcgtcgtctcctcacaacacacgtgaaaaactgtctagggtttgcctcctcctttgtactgtgtcgtcgctcgtagtctactctgtctcgctcaccagcgtgcactggcgatcgagagagtgggtttccgaaaccttcacctttgacgctctgcatcgggataaggtgctaataaggtttttaggaagcacttcgcgcgactgcttgctagtcttccacgatggctcgtcttcatctacacggatgttgcgtgtcgtcatcaacatcctataccacgccgttgttcatgtggtgtgtgttactccccacccttggcaaaccgatcctcttctgcagcagaactagaattgttggtatgtttcgaccatgttctatatattcgatctattcgtgtgtagatgtctcgtatacatgtctagatcacgtgattcggttatgctagtttacttgtttaatgtcatgatctatttacgaaataaattaaatatacatgtgtttatatttccaacagttccaactatgaggatgatgttgtggacggtttggaacttaaagtgacatgctagccatggtaactagggaagcacggaccaacccgcgaacccgcttgtagataaaattagtgggtaaccctactaatttgacatataaatgggtttatgggtcgactcacttgtatctctagatgcggcaagctggtccacgacgtggaacccactggttaccacttattttacatactaggtgaaaccctgcgttgctacgagagtttactatgataaaaataatgtgtaatatagcttaaacaacataagttgatgtgatttaaatttaagttgtatatagaatgatgattcaaatataaaaataaagatgatgtggctttatgagagaataaaagaaggaagataatttagaccatatatctaagggcttaaaaaattgagatgatatggcttaatgagataagaaaatgatagataatttgaaccatagattaatcatctaaagactaaaaacaattaatgcgatatgacttaatgagaaataacattaattaagtgaggatgaactatataggtatataagatattataaaaaaatgatagagagatatattgaaatattatatgaattgtgtgggatgattttacatgcttacattttaaatctctaaaatttaataaattatacaattatagataatatagcattcttgcatattgcttaactgtaatactactaattattagtggatgattatgtaacatatttgaattttaagttttaagaatcataattttaagttttaagaattacagggttataaattgggaaaaatacgaattaccccctgaactatcgcggtcgaccaaattaccccctaaatcacaaaaccggacattttacacccttaactagttttaccggacaaataaccccctaatcaatccggagtggttttacgcctacgtggcagtctaatcagcaatactttttattaaaaaaaagtcagtggggcccacctgccagattctatctcctctctatctctttcctctcccacctctctctatctctctcacgccgaaggccgacgaggaatccacgcgccgacggaggccgagaacgagcggcgcgccggcggctgcgagcctcctcgcggcagaggccgagtatgaggcgcgcgccggtggacgccggccagtcaagctcacgagctgggcctcagcgccggacttgtgcaagaagatggcgatggtcgatgagcggcagccagcgccggacttgcgcgagaaaatggcgagcgcggcggccggactcatcgtcttggaacgacacccacaagaagatggcgagtctgcatgtagttttcctatttatgttgataacaaaccagaaaagtagcagcagcagtacgcggcaccaaaatctcgtcttcctccgtgtactgatttgatccaatcttctgagtgtttgttggcagctagaagtaggttgttaggattttccgggcgtggctgacaaagtgtgagaaagcacgacagcggcagcgggctcgtcactgcctgcgcgcgagctccggctccgccgccgttgcatccgctttcgcccgagttccaccgttggccgccaggcgagcgcatgcaggagtgcttcggccgacaacgtgctgctgtgccgacaaggaggaggacgcccggccggcgagcttgacgggcttgccgccgccgcccgagctccgccgtgcgggagtacttccgctaccgcgtagcgacttgctgcgatgttatgccgacaaggaggtggaggcccggctggcgagctcgacgggctggccgccgccgcgtgcttcagcagcatcccctgagctccaccgatggccgacgggcgagcgcatgcaggagttcttcggcacagcgcggcgagatagagagaggggaaagagatagagaggagagagaatctgtcaggtgggcccccaccgacttttttaataaataattgctgtctagactgtcacgtaggcgtaaaaccactccagattgattagaggggttatttgcccggtaaaaatagttgatggtgtaaaatgtccggttttgtggttcagggggtaattcggtcgaccgcaatagttaggggataattcgtactttttccttataaatttatagtaagagataataagtaggttcgtgggtaagcccgtttgcatctctacgtgtaaccaccaataataggtatacctattgttgatggttttaactatgagctataccagaagcgtatggtatatttgaatctgtagaccttttaggtgacgtgcatatataagagaaataaattaaaataatgttgtacttctaatacgcttaaagcattatatacgggcataattaacatgcgccgattttctagtttattatgtgggccagtttcgtacttcctggttaagtaaactagccgcaatgtcgactttccaatcctcatccgttcaaattgaggtgcaccgtaatgtctactgcgcaacccgctcgatcagtaacgaactgatgagctgagcttggaaaaggaaaaaggccgaaaggagatactccgcagtactccctccgttttaacaccattgactttttaagtacatatttaaccgttcgtcttattaaaaaaatttgtgaaatatgtaaaactatatgtgtacatgaaattatatttaacaataaatcaaataatatgaaaagaataaataattacttaaaatttttgaataagacgaatgatcaaacacgtactaaaaagccaacggtgccaaacattttaaaacggagcgagtataaagcaagtcaaagcatccgccgacatgtgattaaacacttacaacgattatttgacattgagcagaggtcgcttttacatactccgcacaaagtcaaaccacatccataacaccataaccaacacgccgcttcagtttagctttatcgacgtattcttcttcttcaaacgcatccagatgacttgcgcattgtttgacaagtgttccacagcaagaaagacagagattcagcaatgcagattgcaagtggcttttcagtagtcaccatgttcataaataaatttcagaatatcgcagcagcctttgaactggtgatcggcaaaccagttgggcacttgagcgtgtctgcaaaccgaccaagcattggtcaactgaagttgaatcggcgagcgtgcagttggtagctcgcccactggggcagctacagctgctgcaaactgcatctgcaaaatactcctagaacaggtaagctgcacacaggtgagcattgcaggggggagcaggctagtctggataatgcaaatgtcaacggagactggtatgaaacaattgaattaacacaactgcatctataaaatgagatctatcttggacctaacaacagcaagatcggcagaagatctccaagctactagtagcatggactctttgcgtgtgttgataactgataaagtgtagagttccagaagttgactaacttcaaacaaatttctttcaataacatgacaaatattacttggtccatggactcgtggagagccggtgcgtggtaagcggcaatgccaacgtccaacggttgggttcttcagattagtcagacaaagtcgaggataaagtgcatgattgaagaaaaatatgaggatcagtgtgtttccttcaactgtgaactaaaatatgagctatgcagatagaacaaactgaaccgagaagattgttccaaaacagcaatgcatttatacacaaaaaataatagggctcccaaaataatattgtagtttcagtgtcactaccctaagatgataagattctacttactaccaggcaagctttctttgacttgctgaatcagcaccatggcaggcgttgaaccactttgacaaaagaggggaaaaaagcccgtgactttgcatcaattcagtgccacatgcaaaattgtaacagctcatatgcagcctgaatcgcaaacgccaaagaagaaacaataaccttgtttgttcgatctccccatcagaaggattttgttttgtattttgacatgtggaaattcgagacgatagtgcaattccgaaagaaaaaggacaacctatcaaactcaacgggccgtttccaaatttgctagtgaatgcaatatgtcgggaaacaagtcaacccaaatattgtattctgtatgtatggttggtatcaaactaaccagtatcgcatttgtctgtttgggccaacatgattacaatagcacactgctacactgaagaaatggtagattagtaggtaagacaagtacaaattgtttgttggaatatccagatgtgtgcttggaccaaaccaaaattacattttgccctacataatcaaatactaccagtgaatgcaatttcagaatgaaatttcatcccccgccagcaagcacatatttcgcccgaaattttcgggttttttttccattttttttgaaactggtcaaaaaaaaattcaaattcattcgaaattcgtcaaattttcaaaaaaaaagggggccaaaaaagtaccgaaatttcagagattttggttcttttggccacccccggcaaaaatcacaatgttgagattgctaaccctgactactacagcacccagcttgatgcatggctgaaaagccactttatcttgttattatgcaaactatgtggtttagactgtagagattgccaaaattaacaagtgaccaacaccatatcctttaacctttatcgatttgtgcagaaagagaactataattaatagtaacaaagagggaggggagggttcgcgaaccagtagaaaacggctctctttgccctgagcacgttgctcccgttcttcataaggattgggttgctctgcccggtgagtgcgcgcccctcgtgcgtgtgtagcctatctcctttcttctagtcggcgtgcacgcgatcacgccgcacttttccaactgcaactagtatagcaaatgcagtgagaattataaataaaatcgcatgcttttccaagtgcaagtaggcaaatgcagcgaggattataaaattgcatggaatggaaggtgagcgaaaggaatactgaatacataaacaagcaaaaacacgatccatcagagcgtccggcctgtgtgctcgcttctcgaccagtgctgattgaccaaccaaaacctccgatcaccttgtcccgtactgaaaatgctccgtttttgacttgtgcagagttcactatcgttgccacgaccatggtgacgatggcatcacactccgccattgcaatggacagataaatattcccccctcaagctctttgtcttctcctgctcctcccgatcccaatccgccattggtgggcgccaagctcagctcgttgctcttcttcttcttcttcttcttcttcttcttcctcactcgctgcccactcattgggaaaaatccgagctcggattgaggtttgttggtaagacggacagccatggaagcggtgaggtgttttgtggtgttgtgcgtggctgtggcggcggcgctggcttctttgggtggcggtgcggttgatgcggcggcggcggcggcggcggcgcaggagatgcggcgaggcttctcggcggcgcacgaccggtcctactcgcagttcgagcaggtgctgtccgaccccaccggcgtcttcgccctcggcttcctccgcgtcaactccaccatgctcgacctcgccgtggtccacctcccgtcctcgttcccgctctggagctccatccccgaccgccccgcgcagtggtccgcgcccgcttcgctctccttcgacggcgacctcgtcctcaccgaccccgccgccaacaaggtcctctggtccgccggggccgccgccggagccggcggcgaccgcgtggtgctcctcaacacctccaacctccaaatccagagcggcggcggcggcggcgacggcggctcgtcgcccggtatcgtgtggcagagcttcgatgccccatcggagaccatcgtgcaaggccagaacctcacctccgcggcggcgctctacacctccgaccgccgcttctccatgcggatggggaccagctacttcgggctctacatcgagccgcccgcgtcgtcgtccggcggcggcggcgtcgcggcagcgatgtactggaagcacacggcgctgcaggccaaggccgcgatcgtggacggcggcggcccgacgtacgcgcgcgtggagcccgacggctacctcgccatgtaccagaaggaagggccacccgccgaagtcctctccttcgacaccttcaaccatggcgtgcgggcgctccgccgcatgacgctcgaggccgacggcaacctccgcgcctactactgggacagcaccggctcccggtgggtgctcgactacaccgccatcaccgatccgtgcggcctgccaagcacctgcggcgcctacgccgtctgcgtgccgcccagcggccggtgcgcgtgcctggccaacgcgacggacggctcgggatgcgccgccgcaaacgtcggcggcggcggcggcctctgcggccgcacgggcggcgaggtgggcgggctgtactgggaggtgcggaggcagcgcgtggagccggcgaacaaggaattcctgccgttcgagcactcgccgtcggcggcggactgcgaggtgcggtgcgcgcgcaactgcagctgctggggcgccgtctacagcaacggcacggggtactgctacctcatggactacccggcgcagatgatggtggccgccgacgagaggaaggtggggtacttcaaggtgaggagcctggaggaggcggcggcggcgagcgggggcgggagggcggccggtgtcaaggcggcgctgcttgccgtcggcgtgacggtgctggtcgccgcggccgcgttcggggcgtacagggtgtggaagcggaggtgccggacggccgtggacgccaggcggcaggtcgtcgccgacgacgaggggctctcgccgggcccgtacaagaacctcggatccttcagctccgtcgagctctccagctccttccggaggtagccagccagccacctgagatgtggtgtgattgattagatcgatgagatcgctgggaaacagacgccgtggacggagaaggcaaggcaaagggcggcggcggcggccgctgatcggaagaggcaggcccaaattacggtggcgatgacttgggctagtgggctacttctgtttttggagggaatgagggatgtctcttgtatgatttcggccagttttgatcttttcgttaggcccatcatattatcctcgggccattttctttcctgtacaaatttgcccctccatctaaaaaaaggaaatttcttccatgctatggtgatttgtgaacacattggtccccatcgtttggcttatttctaataagccaaaacgacttattaaaaaataaaaataaatttatagatgaaacttttataaatgtgttgtttgtgacttaaaagccaatgttataaaagaaactacgttgaaaatatcttaaaatcaatctcaaaattaagtttgaaaattcaaaatttggctttttttaggtgattaggccatccgatgggagccattataccatctcatcaagtcattattatgcaaaatttaccgtcagattatacatcatgcaaaattgtaatgtcagaatttacacggatactccctccatttcaaaatataagacacaaccacccttgacccaaagactaaaaaacaattattatcgcctctttgtttgaatcaatccaactaatacaatacatgaacccaatagaattaaacatattgtgagtgtacatttaaaaaacaataatttaggagaggagagatgctaattaattactatgcatacatgcatgcattatattataaaacacctttaaaaagtagttgtgccctatattttggaacggaaggagtaactgttaatcttgtcttaccaacgttaaaacacagggagcttaactgattagtcttgagcaattttgaacttaaaacacagggggcttgactgattaaattcggcaaattttgaactcaaggggcttaactgattaaactaacacaggggacttgactgattaattaaacttgggcaaattttgaactcaagaattggcagtgcttgctgcaaagtgcggaagggcctaactgctaaaataagggtaacttataagaaataaagtggtcttttatgcaaaagccgaggagctgaactgcaaaatccaaggagcaaaatttaaatttgaagaattggcaggggccgcgcgaacgcgtaccccctctaccacaaattatgacgtccactctcccacttggggagatggtaagccagcgcacccaccaagtgcaatgtgggccactagcctaggccatgacccttcatgatcggccatagaccccgtccaggtaagtatggagcaacggtgcacctggccttggttttatagcgtgctctcccgccccagcctcctcgaacaagcgatgtggtactaaaaaaacgctcctgcgtgctgcggtttggaagccggggaattcgagtccggacacagcatatgggccgtattgtgtgcaggccttctcgtttgggccagatttatacatacaccccgaagagcagcagaagagagtaaaaaggaataagttcacttcatgaccctcaaatgtgatcgaaatctaatccatgaccctaaactacaaaaccggatatctcgacccccaatctcctaaaaacggtgcaatttgactccctgggcagttttgggaggcagttttgctgacgtggcgcctacgtggcaatattgaccgagtctttattacaagtggcgttgacgtggcacctacgtggcggtagaaataaaaaatatgcgtgggacccgtttgtcattttcacacataaaaaatatgggggccactgacatatgggccccacatgtcatcctccttccttcttcctccctctctccttctctctctttcctccccttcttcggtgtggggagcggcggtgatggtcgatggcggtggggacgaggtggtggggagcggcagctgtggcggtggggatgaggcggaagggagtggcggctgtttcggtggggacgaagcagtggggggcggcggcagtcggtggccatggggacgaggcggtggggagtgacatctgtggtggtggggacgaggcggaggggagtgacggcagggagcggcggtcaggaggagtggcgatggtggtggggacgaggcggaggggagcggcgacggctgtggcggtggggagcggcggctgtggccgtggggacgagacggagaggagcggtggtagctgtgggtgtggggagcggttctccggcgagtgtcacgctcatggcgctgatcgacgagatggggtcggcgtcatggaggaagtcgaccggcgggggttgcccttggcgtcgtcaatggctgaagatggaggcggaggttgaaggcggcggtccacgcgctcgaagccagcggcgcagccgtgctggcgtggaagagggaggcggccacttggggccgctgcgagacgagcaggacggcggcggcggcggccacaagttccggccttcgagcgcccgccaccgccgccgctccggccttccaccgctcgccgccgccgctcgagcccactgccgccgccgctcccgctgccgccacatgtgagaaagagagagaagggagtgagggaggaggaaggaggactgacatgtgggccccacatgtcagtgagcccacatttctttttgtgtgaatgactaatgggtcccacgtatattttttatttctaccgccacgtatgtgccacgtcaacgccacgtgtaacaaagacccagtcaatattgccacgtaggcaccacgtggcgccacgtcagcaaaaccgcctcccaaaaccgcccagagagtcaaattgcactggttttagaagtttgagggtcgagatatcaggttctatagtttagggtcatggattagatttcgatcacatttgtagggtcgtgaagtgaacttattccgagtaaaaataccaacttttccaatcttataaggacaacatgtgaaatgatcaaatcaagtccattggattcaagaatgtacatgcaagtatactacgaagcgggaaaaaaaaactaccatggctcgaactagaactgaaatcagaagcctgtaaaaacaatgttaataacaattaaacaagactggcccctacgtgatcctaaacacatcataatcccttctcgaccaaccatccatctggcgtataacagctggtacacgtgtcagactacagcactgcttcgctgcctctctatgcaacagtagtcatcgatggcccgcggcagcggcaggaggaggaggatgaggatgttcttctgcctgtccgccggcggcggcggacggcgcgggctgctcatcggagacgacgatctccagccggtcgtctgcggctgccgccggttggagcgcgtcggcgtccgacgacgaggacgcggtggcggagagctgctgctgctgctgccggaaggttgcacgcgcgggggccggggtggagggcctggcggcggcgggggggcagtagaggggcggcggcagcatggcggcgggggaggggggtgggtgcttggcgttggcggcggcggcgcggagggaggcgcggcagacggggcaggtggagtgctgcctgagccaggcgtcgatgcaggcgacgtggaaggcgtggccgcaggaggggagcacgcgcaccacgtccttcgcctcgtactcctccaggcacaccgggcacctgcgcgcgcgcgccaagattacgtcagttttacccccccccccccccccccaacagcaaattaagccgacatcagaaaccgtattgtcttgctttttctataaaaaaaaggatataaattgttttagaacaatttagagttttgttatttgctcacggcattcttaattcaattcggcactttgtgcgacaaggaacatatacccacccataaaaaatatttaatatatattgaagtgaaaaatatgtgcaatgagtagtacttaaaaaataatcatatttatcgagagaaagaggagttaagataaacggaaccaagcgtgggaagctaattaattcattgtattgatttctcattggcaatcaatataaattcaccagtatatacaaatattcatttaattaagatataagtaacaatacgacactataaaatgcttctctagagcaccacataattaatgaactattatgacgatatatcaggttccttttaaggccctttttctgctgaatggaatataaacgatatatgcaaaaaaaaattgaatggttgaataattggtgatacttatttaagagtatacacgaatttattaactattataaaatttaaaatggatttaaaacaatattttaagaatttcatatgtagctcgagaagcatgacactaaatagaatgcgacgtccatggctccaccattagataatgaatgtagtgaagttggtatgaaactcaagtgtgaacgtaactatgccgttgattttttttactcgcccgcccaacatgcggtgcttgcagcttcgcgaggcttctactggaagctgctagcgtcttttgagtactgaagtacgaatcgaacggttcatacagtttgctgcctgcatctaacggtggacaatttgcagcttacgtcgctaaattaggattcaagaaagatcaattctttcactactttagatttgccaagagacaacttcaaccattattttaacaacttcaaccattattttaagaactacattatgaaaaagtagtgtgcactatctactggtataaaacaatctgaatcattgatctcgtttgattagagggtttcagatatattactaccacctcaataaacaacaatagtagaaacatggagggtattattataaaaagaaagatgcaaaggggtataattgtcatttagccgtgattaaacttttttttctccctttttagcttttccgatagaatatgagcaaagccatcgcaatgaatgattatagaacgatttagccaagaaaaaataatacataaatactccctccgtttcacaatgtaagtcattctatcatttcccacattcatattgatgttaatgaatctagacatatatatctatctagattcattaacatcaatatgaatgtagaaaatggtggaataacttaaattatgaaacggaggaagtaatagttactcttaatcatggtattagtaaattattaatttatctataataatactggtagtataatactacagtattttaatatatcctctaagagagtgaaaactttacggaatacaattttacaggttgtgtcatattgcaacaaaggtaacgtaagttcaaagtaaaatatgtctattgcaactaaggtaacatacgctcaaagtaagacaacaaaagtaaaattatccagtttaaaatagaaacattaattaaaatatggttcaaaatatcgatataaaagatggcccaaaatttacttttatagagaagtgatatgttcctaactttgaaagtcaaaacaacttttggtaggagtacaataaagggcaacatagtacactaaacaaccccctccctattaatataagccataattatagtattagtgaccactttcgatctgactttgtctctctggtacgtcaagcacaaatgcacaattgactatttctgaaattgataggccatcatggcctttattggtaagataagggcagttcgaacccagagaaccactaaactatcttgcttctgttaactaatatccataacccatcatatagtttccagtttcgaggtgatcttccccattttgcacttctacttcagtctaatggcaaaaaaacaggtttctgtgacttcgatcttacagaacattatattttttttcaagtaaagccaagtccagatcatcttgattcttaagtaaagctagctaaatccgcaaaattcttataaataaaaagcaaatccgcgcaacaagaccgttgcactctaaactatatttaaattaagagaacatgtgatttataccagggcgaaagctatcagccaatgtacctattatctctttatcaatctattttactctctccgttcttaaataatatttaccattttagtctaaagatttatctcataaaactttcttttaagtggacccattagacatttttaatacaacttcaatattcttcttcttgtttagccattgaaccagcaatgctccctcctcgtcgtcctcattttctcttcgcattaatgaataacaaagtaacattttaatctcttacttaatctacctttgactcgctagaacaatcgtcccttaggatggagggagtatattgctaagaaaagatagtgaaccatcacatttgtttcgagatcttagaaattactaaattaatatatgaggaaaacataaatatttgtaaaattttatcgcattgaatctagattataacctgaaaaatcgatcaatctatataggttatatacatgtatttttattcattatctaaaaatagttatatacaatataattatattaattatatttatagaactacaaataagacccccacataaatacaatttttttaaggaattaataaaattatttttctaaacaatttttaatctagctttctgtaattgtcaacgaaattcagcaagttgtgatcgatcgtaaagaaaaagaaatgattcagaaaaaagaagagctctctactgctaaaaaataaaaagaaagcggccagctgccgtaaaaggaaaagggccacacgaattttgtttcgccacgccatcgctagatacgctcgcgcacaaagcgaattcgtctcgcctgacgtgatgcatttctagctagctactgtactagctagttgttgttggtattatccgcgacgagaaattaaatttggtcgaataatcgtggcatgagcgcgtgagattaaagccaatttaaaacccaacaaaaagagggaaggattaattggtggtgccttaactgcgattcctccagcgccgccgccgcgcgaggccgcgagccgccgtcgccgaacttggccgttgggaagctcgtcaccaccgccggctccagcccgcggatcccgcgctccacctgcgcgcgcgcgcgccatgcgaaccgatcacaaacacgctcgtacgtacgtagcacgaacgatcaacgagaggatggggttgctgcgtacgtacgctgaaggccgggaaggcgtcgccgtgcgccgccgcggctgcggcggcggattggcccgccctgaggtggatgcgggcgcagagcagcctgacgaagatgaagagcacgaagaaggcgctgacggagaaggccatcaccgtcgtcaccgtgttcatgctcatgccgccgccgccgctcgtcgacttctccgccggcgaggacattcgccctccagcatctcactccgggctccaccaccaccaccacccaatccgcgagctcagctagctctggattggatggtatcctcctcctcctcctcctctcctcgccgtcggagaatcaaccaattaaccaatcaagcaatcaatcaaatcaatcgaccaatccacagctccccgccgtaataaagtggaagaggatgagaagggcggagcgcatagcgcatagcggcaacagcgagtgtgtactcgcctcgcctgcacccgcctcggcctagggaaattgttttgtttccgctactggtaataatctatggtcgtctgccgattagttgcacgctaatctatcatcgttgagacttgagaggctaataatcctcaattgttaagggggggggggtttagactgatgattacgcccactgataatcaatcaatggatgggttagtttaattaatgaacttagcagctgctgctgctgctaggtgggacctcgctttcagacgtcccccgcggccgcggcccgccccgctcgcggggtcgtggtgcccatgcacgcgcccgtccacgttgcgtgtgtgattgatgcgtttagcccagcgactagctgcttcgccgtgccgtgtccacgcgctcccctccatcgccgtcgcctcctcctctcctcgttttttatctagataattacatatttcctccgttttattatataagttattttaacatttcctatatttatattgatgttaatgatatatatgtctagatttattaacatcaatataaatatgaaaaaataatagaataaattatattatgaaacggagggagtagaagatacacacgcgtgaacacatgtacacattgattcaaagatacaccactacacatacccaggtagaaatgtaagtggcccacgaacccacttatatatcctacacacggccggtgacacgggtggcccttgctgacgtgggctatccgtgtgcggagtgcggacgtggcaagtacaaccggatcgagcggatggcacggcacggcggatcgcgggtgaaaaacggtgtccttttttttttaactgtggtttcattaatcgaagcgccaaagttcttttgagtaccaggtacgtgttcaagaataacatgatggttacaacacgtagtatgacaaactgccccgggacttgtcgatcgatgaggcgaggttggaaaacttataaaaactgatcggtcaggaatacgtcaacgtatttgatactgtttcctctgaagaatccagttcaggaataaagccccgaggaaaaaaaaagagcttgatgacacgatctgtcaattagtacgcatttgctgccaaattaatcctgtttcgagccctctaattgggaaaaaaaaggatttctcttgacaatgacgttgcaattaaactgaaccatacagaatagataaactcgtgatcccatcagctatatcaaacgcgacgacacatgtgaggtcacacaaatttggctcatcctcgtgtcataaaaaaaaagaagaaattgcacactgcaaacaagctctttgtggtggcagccatgggcccccaaaagcccaagtctagtagagggactctaccgttttgttcagctcttcgagcttcttcatccgcagctgctcgctctcgcccacaagctgctcaagatcatatggaaatacttaatgagagtataacataataaattcagaagaataaatatataatgtaccaaaaaacattactataagaactgcagcgtgtagtaatgatcttctgaatatattatgaaatgggtattataatacccacttcacaatattattcgtctagtttaaactttacaagttgttccgtgtttatccatcgagtaaattaagatatacaattgtgtatttccactgtctatctttgctataaatggtgaaaaaaaaaacttaattaattaacatatatcatctgctagtgggaatcttgctccattaacggtggttaggcatttagaggaagttttggacaaatatacattaggcccaaccttgttgatgaagatttgagacaaaggctggatgttgtcttgttgcttgggaattttgggctaggcccgaaaattataactggaccttgaaatggaagtaggcatcaactttaaacaattttggcgcaaaaaaaaaaacagaaacctccatttggtactccatgggtaggtgaaaatgattggaggattcttgtgattggttgagaaaagaaagtaggtaaaaaaattaaatagagaatagttataattgattaagagaagttggtaggtgtaaaaatatagcttccctaaaaaaaaggtgtagaaatagattcattttgagacaagtactagaaataactatattttagtacgaatgtagtatcaagctagctgttctttgttctcacccttaccttggactattctcatataactacttcggttttttaaatatgttttatcaataaaggtattttaatcatgtcttatctttttacatatttatactatttttttaataaaatatattatcaaacctcatgtcgaaaaatcaaagtcatatatttaaaaacggatggagtaaatggtactacggttgttagtttcctacatattttttatgcaaacatttccattttatatttagataattggaatcacaatttttttttgctccaaatagttcaaagaattttgaacttttcaatgaaatttgatcaaaattcaagtcagtcctacaactattttgactgaatatatatgctatctttcctgggtagctaaaaaccactgaaaaccgctcttctgtcactcacctccatcaacctgttcacaagcgttgctttctcgttgctcttctcgttgtaagcctctaggcacgccttgtattccttctcctgtttgtttttagaggggaaaaaagggttaacgcccggcgcatgcggttgaattcgtcgtaacaaacatgtatgtacagctatattgctgaagaagaagaagaagcagcaaaaaagaaaaaaaaacacaatggcatcctcaccttcttgaggcagttcttgccgagcggcttgagctggcggttcaccttgtcgatgcgcttccgtatcgtctccacctcccgccgcgtcggatccgacatcacctccagctcctgcaaatcaaccaacagtttagcttgcgatcagagatgatcgatcgccatggcggacacaggcatgcacggacgaacagtcgaacactgacctggcggatgaaggcgaggcgcttggtctcctcctcgacccggccgagcatggagaacaccttctcccgcacctccagcttcttccgctcgatctcctcctccttctccttgaacagcgacagcgccgaccgcgacgacgactggtcccactccgacgacccatcctcctcgccgccgccgccgccgccgccgccgccgccgccccgcacgcacacgatctgcatctgctgctccctgccgccgccgccgcactccatgcctctcgcctctgcaggtgcttctctgctgctagctgcaacctctctctctctctctctctctcaccaaccaatgctaaccttaccgcagcgagcaatgtgtaggaactagcagtagctaccctaagctaacaactcctctaccttccaagcctatttatctcttctcaatcttccttcctgctgccgcttggccatgttgatatgcaccttttttttttcttttgctgcagaggattaatggttgagtacaagtgtcctacctgcagtctcaaccttgaagcaagcagcggcagtgcgtattaacaagtttatcaatggcttaatctgactatatcttcatgcatgtgtcagtcatagcagctcatgtcaatgatatcataagactatctactagggatttgatggaagagaggacagcatgatttcacgtacatgtgatgtgagctggggagcaaactgtgttaggtgaggccactgtgtcaggggtcgagtagaagtaactcctgcgcaagccgcccaagtgtttcattctcatgtgagccaatgcctacatgtgcactgcaggttgcaacctgcctgctgcttccattttcattttgcttgctgcaggtgtatccatctctgacttggccttgcagcatcagagactcgagagttgttttcctcttccattttgatatgtccttgcgttgttattgggttaacatctcggagaggaaagctgagatgtctcttcagccttcagggatgggagtgctggtgctttgtgatgaagcatcccacacatttgtgtagctgtgctagtactcaagatgaagtagcagtcaaggataagcagaacagagtaggaccacacgacctgtttagaagctgacatggccaacaaactttgactactagaaaatctcaccttgaaatcactggaactcaaagcattttgcttaatgatggctaagccccgaacatgattctaacttttctttttgaaaggataaacatgattctaattaactaagcatcaagattcaagcatcacaagatgtacagaagtgcagaactatgtataactggcagttcgaacggtaccaacaaatatacggggttcatggtttcgtcgccgttcgacagccatagataattacaaataaacgtttctttccctcacaaactaaaactacaaattgggagcgcaaagcacaaaagcaagctgtctagtctatccggcattcatcgaagcagaacctaggaaagccgttcacagattgctggcaactagtttttcttgctccttcgcactagcagccgcacacacttgcatgctgcctcttggtgttctcattccgctggagcatagacaacgcaggttctgctaggagaataaactgagaacgagtagggcctgttgtcatgtgaacaatcctgcaaggaatgagcacaacagaggttaataaagagcacacaatatacggtacgcaatttcatctgagcaagacttacggcagtgaagtgctctgcagtgtgatggatcctgccaaatccaccaaagagtccagcatctgagtccaagaccacctgatagaaagcaacataaattattttgcagttcagcaaccaacacatccagttcgtctgtaagaagcatgaacgcgctgcaaaactgactagaggacttttgagtaatttttactggttattttcaaatatatggaaggagtaaactatggcagggtcaacataatgggcacgactagtgtaggtaaatatgaagtgttgatgattaccaagaacttctttgctcgtaattcctgatttaacaccaatcaataaataatggcacttgacatatcccagagacccagggagaaatattagttacagtacaattggagacgtacataacatgaaatttttttagtccacattcaatattttttaatctgaataggaaaaaaaaatgaatggttgcaatttgaggatccagacctaggactatcgctaacaaaggcaactccttgaccaccggggtgcatatgcaagcatagttgtcaatctattttattcttgggcagaaatcatacaaatccgatttttttggcattttgccattttctacttggttaacagtaaggtcggtaaagccttacctagtgaacaaaaactataattgatcacgggcaatgcacaaatagctgcataccttatatttccctggctttaaacaaccaacacggtagtcaaaatagctgttactccaatggaagttgaacacaaataccagatctcccttctcaaatataatcatcttatcctcttcatgctttcgagatatgtactggtggtctgatgtcatgaactgaaataacatagccataagaaaacccccatcagtgtcagagcaatgttaaaacaaaaccatcattttacttgcaaagtttttcctataaatacaaaaaagaaattctatgaagggaaatatatgcattatattattgataatgcatttattcatcaataaaaatataaaattactgtccacatagcccatgcaaacaagacaaaataatttaattggcatcgaacaaagctgtccattatttaacagtattgattactattgcaatgattggaagacatgagaaaacataatgatgcacctagataatgacaatgggagctattcctaagagtattggacataattgcataatgcacaagtgcagctcgtcatttcaccatatatttcaagtggttttggataaatagttgacatagcaagtatcagtaacaggacataagcataatggctcatatttgtgcaacccccagaaaaagataagtgataaatacaacataccccatatttttcctcgagagactgcatcgcgcggtcaaactctagcatgccacgatacctaagatagtccgcatcaccctgacaaagcaatgaaaaaacttactgatccataacaaaatcatggttcaatgttgctggcctcgcacaaatgttaatgtgaataaaaaggaattgatgaattagatgaattgtcataatgggaccttcatgattaaaacactgcagaagggggtaaaaagatatctaaattgaatccagggaatgcagaacttattttcatcaataatcaggtgacagagcaaagaaagttaccaggtcaaatcttcgacggcatttatcataactgttgttattccctgggatgaatttaccatttggaagtacttgtggagctcttggaaaatcaatccattctgcaaaataaaaggtagatcaatggcctttaagccaattgtttcccagaaaatactaggtgacaagaaccattgtcatcaaatgagaagttgatataaaataagaaacaaacatggtgtgtgattgttattaaatctcaccaggatgtccgaactcatttcccataaagttaagatagccttctcctcctaaccccattgtgataagtctaatcattttatgcaatgctattccacgatcaatgctaggtgttgccggtctgtccagagccataaaatcatacatatcctgcataagtacagtatgtgaggttctcatgccagtattcattaaaattcatacatatcctgcatgtatatgcattttctcaacaattaaaactcaaagaacaactctattatctcaagaatagtacggtgatacactgatacacaaatatgttttaagtattaaaacaaggaaataacattttccaaagaactagtaaagaatagaaaattcataaatacatgttgcaactaatacaagaaaaactgggtgtagactgcagaaagcctaaagctatccaacttaaaacactgatctagctgtggttttcataccgttcttactatccacaatgaatgcattgagtatatttgagtaaaatcagtacaaataattatcaaggatatattaaagagccattagttacagtcctaatcagtaaaacactaaaacctagagattgatgtgtggtaaccttgtccatcaaccagaatgcaatagttttgtcaccaactagtgcttgatcatgactttcagcataagtaacacacttctctgaccaccttctgttagtcagtgtgtgcacaatatcacccatcttccaagattcatcactttgcctgtgtaaaataaaaattgaaactctggcaccacatctttcaattaaaggatacaaaataacaatctttcccagtttctaaataaaagctaaacagctgacaaaaaagtgagatacgatgagcatgggcatttttataccacataataaaggagcattaaaaatgtaacgttgccaagtcaaactctataagttggtagttgcatcttattttatactaataatggaactcacacgaccactgttcatatgaccaaatccagcacatcacattggtaaatgcctataaccctatatatgagtgatcttttttttttttaaaaaaaaatcaagggcaggagttatgccaattaacttcagaagagaaatagagatatcatggtcaaggaaaccaatgtatacaaaaaagaatttaacacaagaaaacagtttatgttcattagatatgtaattagtatttctattaaccaaaatttgaaacacttacttgaggagttcaatccatttgtcaggaacagccatatgaaggcgataatcaaaaccaaccccaccatcttgaacaggaagggcaaatgtaggcattccactgacctgaagtagttatatgccatttaaccacagaacagttgaaattaagttatcttttgcaatagagttaggtttacgtatgggatttagagtattgttactactattgcaactctagaccatacaggcgacaggctgagcaagtggtctgcagaagtgtgtcttctgtgatcaaagtgtggagtcaattgaccaccttctaatccaatgtccagaaacactacagctatggtggacagttctatgcggcattggccaatcccattgcttcccatcaaatgagcagcccttcctcgtatggtggtgcgacagccgagacaaaatcatagcggcccaaagatgagggtttgacaccatcatcatatcctggtggcctggacgatacaaaaggagtggaaaaaccgggttttcaatggtcaatgcaagaccatgcaggagatagcggagctagtggcatcggaggccgcgccctggagggaggcaggagcgcgcatctaggtggagcatttggtcatcaaattgttccgcgagatattactatatgtttcccacacccatttttcttcctttctccctgtacatagttgctgtgcctgttctaacaacttttcccgatcttaatacaaaagatacgcattttgcgtattcccaaaaaaaaatgtagaccatacagagctactgtataacttgctttttgtacttcacaaacttccagggaggctggatttcccaagagaagaaaaggttatgacagtatggcaccatggaacatgcacagctgtttttgaggacacaattatactctctttttttacagaaaaaatgtactctttttgttcagaaatatgtaaatttttagaatgcacgcgttcatatttcaaacttctctaactcagaataatatataaaaacaatcaggttattcacatgcaaatggtgccattatattcgtcacgaatttttttcataacaatacatttgtataattctttactaacatactcgtataacattgatggtcaacttctgtactagagaccaggtggtcactaatctttggtaactatcattactccttgctgttttctaagcccaaggaaaacaatttcttgaaccagcgacataatttgatcaactatcaagatggggttaatagtaaatatgtaacactaagattggaaagctaagctttgggtatacaacattatgaactagagaaggcaaaactgacattagcgtaatatgcagtgcaagctttcaacttcttacttaagcatgtctagatgccaaaatattgctataaatgcatgctaaagaaatgagtacataaagacaaatatagtcagcacttacatcttcaccgatggttatggcctcaggataaagtccatgaattaaatcatttaccagcatcaagtaaactactgcatcagcatcagtggcaaatccaaagtattcactgtagttccccgtaaatgctacctaaaatagagggtggaatcataagataaaggttatgacgcaaataaatatgaaattgtaacagatagcaactgctaggtttgaccccatcataattaagaaggtagtgaagataaagtaatgaaaacgaagcaatatacttgtaatccatgatgagtgtacatcattgaggttacaccgtcaaatctgaaaccatcaaacttatactcctcgagccaccatcttgcattggatagtagaaatcttagaacctgtataaggataaaaatgttggcaaacacaatagagattaatgcatatgaataatgatactttgtaaagggaagtagcgattaacgtgttccttacttcccaattcccatagttgaaaaggcgagaatcccacatccaatgatggccgcgtgaaccactatgaaagtaatgcgtatctgtaccatcaaaaccgttcaacccatctagggtattatttgacgcatggctgcaaaaggaaaaaaaaggggcaaaggtaaagctattaggtatgcagctaaaaggggacttagtaaatcaacacaaaggttaatatttgaaaccaaaagggcttagaacccagaggccaatgagctaaactttgggccatggtgattgacaaattttggcatgtaaattagttctagttgttgtccaccagaaagccaacaaaagatgtcacgaataaaatattaatttgaattctcaaattcaataattgaatagaaaatatgaatgaaactgtttaattcattttcttcccatcctaagataaactcgaatgctagccaatttaaattgtgaaaactcttatactgcaataattcaagttaaacatgttgcataaaagagagaagatctacggttgtagattagtcataattagggttcaccaacatgagggctagatgtactttttttttatagaacagagaatcataccgttagctaaatacccatgagtagaagtggattttttttaaaaaatatcataaaaatgaaatgaactatgcatgaacttctcaggaaaaaaattgtaatttgtaagcaatttggaaccaaacattaatccacaaacagcctagccacatgcataaatgatctatttatccacagaagatcccacaaactcaagaggtggtggtataatggcagacttaccaccacagccttcttctatattataaggactttcttttatctctgtggccacgccttactaacttagatatgaaagaccagttaacaaatactcattctgttcacttttataacgcatattttgatttcagaaagtcaaactcgaaagattttgaccaataattagttgatatacaagtatatttagagtataaaacatataccactagattcatacctcaaagtattttcacattatattggttttatagctatgataaatatattttatgagaaattaattgtcaaatttcagtcataaatactttctaaaattaaaatatgccttataaaaatgagcagagggagtaattaattacctgtgaacaacatccatgagcacaactaaaccaagctcatgagctttatcaatcaatgactttaaatcttctggggtcccgaaacgactacttggtgcaaagaaattggtgacatggtacctgaaacaaaagtaaaaaatctgcattgctcacccataataaaagtcttaattgacaattgaaaattatctcaatagccattcattcaaaaggtggcgaatgtcatttgttacagttcaattgtaccaaaacaaaaggggaaacaaaaggggtcagtaacagcattgtttcatgagtataaaaggaagataaagatgataagaaagatgaagcagtttatcacattatacaaagggaacaaggaagatgaaagataaagtctaaaagcatatatatgtaaactgcaaagacaagaaataaatccagcaatatgtaatttgatcacccaaagcttccataatatgcatgctcttgaattgccattatttgcactgcattgtatccaagctttttgattcttggaagcacctcatccctaaagtttgcatacgtgttgatctttggctcctgattgcaatattaaaattaataccagccagcatagtacaggaaaatcataaattaccaacagacgcccaaaaaaaaatgtatacaaatggtaggcatggtgttattcgctattttttattatgtaataataaccgtacccgtttgtaagaaatacaaacatagattaattaaatataccctatgttagcagaaaacataaatcaaaaattatatcagtgtaaatatcagtaatttgtttcaaaacatcatatttgaatcaaccatccagcaaaggttatataaacggctaattgttgacgaatgtgcaaaaaatgtgctgattgtattaatatattattacagaggaaacttgtaacaacttatcactgcttagaagtagacagttataaaaattaaggctaacagcactttaatataattctagaatgtaagttaacttgaactgtatatggctagtaattaaaagaaaagatgcattaccgtgctactcattccaacatgagtttcgtatatccgcaatgactttggtcttttaggttgaggatgcttgaatatgtacttctcctgcatagtcatataaaacattttaataactagataaaaagaacaatctaaagatgccaacaaaaagagaaatttccaagagtccaaggacattacagaagtattcacaagtacaaatgaagcacttttttcaaggaacaagaacatattcaaatggcgtgtgcacgtgttgggggggggggggggaggtacctcttcaggaggatcataatatattccattgtatgggatttctcctgcggcctgcacagagtacttgatccaggcaggaatagaatcctttataccagatggagtttccattcgcacctagatgacaaaaggcatgcttgatacagggagatgctcacaggcccagagctaaaacactggccaagcaggataaggaattacctttacacgtgagccatgtggaataggagatgagccatcagcattgttaggcagaaaaatctcccaaacaccaaactcattctggaaacagttgcattagatatgagcatcggtaactaccaacttaccaatcatatggaattacaacactaggtccatgcattattagttacaacctcaagctactcatcttctcctatcaagtccacaaaaactgcaaaatacatctaggtactaaagaatgtacatgtaacatacacaacattaatgtactaccactacagtagcatcaaaaccgataactaacagttaactcatggcaacagtcaataacatataagagtgtgcatgatatatatatataaaaactcaatcggcgggttaagatggcccgcagcatgaagctaagttgagaaccccacccctgaacgcatcgcacaaccgggattgctcaacctcacatggggagcacgcttctgccagcatttgcaaggagggatttaattttttttgtgcgaaaatccaggttcgagtcaggtttaccactgcgctatacatgcgttcgcatgatatatcactagctcaactctagagtatagatgaaaccaatgctataaccaaataaattagttaaagaaatgtaaacaaaatatttttgaagaaaggaagggcatatttgtgagcctgtgggcttactttgctcatgcggtctgcatttggattccaattgttgaagtcacctactaatgctgcagactgcaattggaagcaaaaattagttcttaacaacgtctagtcaagtacattgacaagttgttcatctgagaattataaattccatacaatctggaatatctcagaatatatggcatggtaattatatctacatgtactagaaatatggaactaataatgtagcattttaggtaaatggtgagactatcaaaagaacatacatgtgccccgggagcccattctcgataagtgacaccttcagcactacatgggaagaaggatgaatatcactgagttattttgttacacccagagaagtgatgtgcggttacaatgtaaaagaaactatacctgtgattaaatccaaacttctcataaccgcgagaaaatgtttccagtcctccttcatactgatcaatgtctgaacgcagtctcctatataggctatatctgtattcaatcaattaaagcataatcaggtttctagtagagttagcatgggcatattgacttcatctatgctccctccatcataaaataaatcaactttccaagttcacgtacgaaagttgttttttctaggacagagggagtataacaatgatataaaagaaaggaaataaagttgttgtccagttgacagacgtcagcaaggtctaaaacccattatgtattttacatcatagataactttcagattaaatatttgcaaaattaatattgcatttcttagttctgacgccatcctatcactcttttgtttggtttgcagtaccgccccaacccagaaccactgtgaagagtactatctatgtattattagtactatttactatgtatgtccaatatactcatttgaccattaactttttttttctaactatatgttgacttaaaaattcttataatggtaaatctatttttttttcgcacattagtagtttaggactcttgttaaattttaaagcatgactgaatgatttctaaaacaacttccatttgagaacagatcagagtatatatgcaggactaaagataaaacttcaagagtctcatcagctgtgacacgtaagtagttatttgcatacatcttgtgaaagactgaacagatggagaataataaaaacataacctaatgaaactatgtgatctataaagaagggcggaaagccataccgatattcaagatggtacttatagccattaagcatagagtccatctggaatattttttgcccatctcctgttggtgggacaactcgtggtttctgctcagcagctaattcttcaaccactctcttcacgccttcaacgtcacttgctccagatgactcaatctcaacttcagctccaacctccgtgcttaattcatcatctaaggctggcaactacaacaatgtacaagagataaaatgttcagaagtaaaacataatgacaactgaacggaatgagcgacaacaagcaagactctagatcaatcctacgcatatggtgtgccctttgaggcctcatatagggtgctctagacctagatcatattatcattatgcacgcagacaactagtatggactaagtacataaaaaaggactgaatcactgaatatatcataatcccgtcacaaacagaaatcaacacgtctcaagacgtggactgcgtgaaatgtatatgatctcgtaaggtagcactgcacaagaacatgtctccattttcaaacatgacatgcaaaatgctgttagatatgtagcaatagtattgtcaaggcaggatgaatcatgatcacgcacctgcagatcgtctgaacctgctgaaaccggcatcccgtcgctctcgccctcggggatcatcacctcccctgacgcgcccgccgcgcgcacggccacgcgccccccggaaccccccacgcgaacggcacctggacacgagacgcaggcaaaaccaaaatgaagatcacgacgatttaccgcacccgcggcgcgacgcgacacggcacgccacctggtcgagccgaggcgcacgcgtggcgcgtcgcggcggacgagaacaacaaggtggcgcgggatcattaccggggaatctccggccggagagcagcgaccgcgacgtcgggagctccgccgccgcacgccagctccgggccccggctggcacggggaaccgcacggcccccgcccgtagccccgccgcgctcccgggaaccgcagacgccggcgccgccatctcgcccgcaccgcagccggatcggatcccccggcaacccccgcgctctgcttccacctaaaccctcctcacgcgagagccaaagcgaggaggcgctgcctggtggtcggtgtgtgggtgtgcgcgcgtgcgggtgcactggtgctgaagctaggaggagcggagggcgccgcgctatatagaggacgaggaggaggagctctggtcctgatggagcgaacccctcacgcgagagtggcagcgaggccgcccgagggtgggtgtgcgatgcgtgcactggggggacgggggcggaagaggcggttgcgcgtcggtccaacccgcggcgcacgcgagtcaggcggcgagggcggagggcgaggcttttcccctcccccctcgcggtgaaagcgtcggtttcccgtgcgcgcccgggcgtcgcgttgcgttgcgggggaagggagaggagaggagcgcgtccatgccatgccagccgctgctgccaggtggaaggtggagggcagcggcgcgcgcgcgcgcggggaggcaggcggagtcaccaccgatcgagttggcgtggcgcgggccgtgcggcacggcgcgggttggggaggaagaggagaggaaaaggaaaccaacggcggggaggctttccctctcgacccgtaacgccgcttgcgtcgcgtctccctccctgctacttgctactcctgtgcttctttttgtttttccttgtcctctttggtcgcgctttttgttacccagggaaaacaacaaaagggaagatgggagttgggctggacccaggaggcttacacgaaacaaattctcagtgaatggaagaacgcaacaccggtgctctgttgtttcatttttctgttctgctctgtcacctctgtgtaaacgttgaggagcacgtgagggagaagcactcgtgcgaagcgtgacctgactagcctagtagcctgtggtccatcatcctttctcgcggtgaacaatgggctgccaaaatggagcacatcctctagcagactggcgactccgcgtgcgtccagcggattgggcagagcgatttttctgttgggccagcccatgaaaccaagcacaccaaacgtgtgagttgagtacttaagaattcaaaaaagattaagttcattggaggtcccttaacttgacaccgaatccgtttatcctccctgaaccacaatataagatataggggtgggcattcggtctaaccgaaaatttcggtttcggtctttgaaaagtgaagaccgaatttcagcgcaaaatattaggaccgataaattcggtcttggtctcggtctcggtcttgactgaaattcaacaacattttcatatatgcaaagaaataatggaaattttcaacacaaaaatcacaaaaaaaatttcgtaagcacttatgagtaaagactcttattaggttgcatacctagaagaagtagggatgtgaaaattagagtttaatcctattaaacatagtgggttgtaggttgcatttagacgtttttttgataattcggttttttcggtctattcggttaaccgaggagactaaccgaattgaccgaacaaaattcggtctttcactacctagggccgaatttctcggtcttggtcttttcggtttggtcttttctgcccacccctaaccagatacaacgggtctctcaactgacaaaaccggtgcaagtaaggtcctaagacggtttggatggtgatttcggcttatgtggcatctacgtggtaagtttgacttggtcctcatcctacgtagcggtgacgtggcactggaagcaaaatttgaaaattaaaaattaaaacaaaaaaatgttggaccctcatgccatcgagcgtttggttaaaaactaaaagaatgatattggaacccacggccaaccctttcttttccctcttctctcccctatttctctatcccctttcctcatcatcgtggagctggtgacatgtgaggccggcgatgacggcaagcgcgcgcggagagggaggtggcgaggaggtcaacgagcacgcggagagggaggaggcagcaaggccggcgtgcagggcggggatgctagcgagcgcgcagagagagggaggaggggggcatgctcggcgggggagaggagcggcgcggggtgcggcgacggaggagaggaagggagcgacactcgctggcctcctcgccgcctccctttccgtgtgcgctcaccagcgtccccgccctgctcgcaggccttcctgcctcctccctttccgctcgctcggaccagccgctccacccccgaacaccgtcacttgctgctcctctcctgccagccaccgtgctgaccaacgacgacaacttcaccgcactcgtcgacctgaccccgacagctgaaaacctcgacaccaccagctccttcaccagcccgaccactcccgtaacgctgccttcctctactgctttcgccgcttccacggcctgcacctccttagcttcctcatccaccacccccgccacgtcgactagccagcctcggttggtccctgctgacgaaaaaaccgcgctcggccgatggtgccgagtctgtgttggcgcgaactaagtcaacgaacacaacggccagggagatctaattagctccagtgcaggtccaaaagttgatgagatgcaggtgtgcctatcagtttgttcctgcaactgacaagatatacaaatagcagatcaatgagccaatcggctgacaagccgatggaataattccagccgatgccgatactagcctatagcgataaggttttgagctatcagctatatgtttgatgtagaatctgacacttgatgtaaataaagacaatcagctgatgaaaacaacaatttaatccaatagaaactaatcggctaataatgatatgatataataagcactgatccaaaggttaaagcatacatcggcttagaagtccgatgtcataaaatccacaagattagataaacagtgaaacgtctgttgccgtccgctaaatccaacttatgtgcaatccttgtaagccaatgcaacgtccagataactcatcggctgaaaccctgatgaaacccttattggcaatcaaaaagcaagctagggattatggtttgaagcacgacttagtagatcgaacttaactgatgcagcactaagtatgaaaagaaacataatatctagacaatcaagcccttgattgattttcagggtggtagataccttagctaatctaatctggtaaagcgatttagccgatatcggcataaactctaaaatgaatctcaaccgataaaagtaaatcgaactatcaaactagattaactaagatatatgatagataggtgcttacatggacaagatcagagtgttgaagccctagccccgccgatgcaagcaaccatgacaagtataaactcatcgaaaaagtagaaaagtaaaagagtggcgatgcgccgaaattgtattgattgtgaagatagtttacaatgaccccgggtgtacatatttatacccatgggtagatactagtccttgttggataagaaataaactttcctaaagataaaaggaaaacataaactccttataggacactaaacacactttcctaaagataaaggaaactacaaatgctttctaattaatagataaattatcatgccacatcctccttgaactcgatattttatatataaacttcgtttaattgattaatttccttaaccgaatatagtgacgacttgataattcccatcggccgattccagaactctgaagctgatattgactttatgccaatgatgacttcagggcttaccaaatttcactatttacagtcccttccttccccgccgccatcgctgctgctagagatggtaatgggttgacgagctgacatggatgcgggtggagctcgtcatctccttcctcatggcgtcgcagcgtagacagcaaatgacgacgagctactccacgacaactctcctcacgccgcctatgtcgcggccactgcccttgccaactccggcggcttgtaggatcgagatgtcgactagatggggagggggtgaataggcgatttaaaaactaaatgacacctaatcaaaactaacataagttgctaggctcagtgagggacaagtctaactaagcaactatgttatgttttgcaatcctggggtgatagtggctcaagtatatctctaggaaagtaaatcacacacctaagttaagtttttgcaatcctagggtgatatggactcaaatatgtctctatgaatgtaaattgcacaaatgtaaatgcaacaaataaatgagacaagagacaaggagtttttcaccgaggttcggaaactcgccggtttcctaatccctgttgaggcgagcccaactccacctctcaaccacgaagccaccgcacacccccttcgtcaaggggtgggcaaggtgggagccgatccacggagaggactacccaaacctcaatcactaggggtagttcttccttcacttcgaaggtggtgaactccaaaccactcacaaccggcgccgggcctcctgcacaatctcctcggagaggtcaccgggcaacacctccacaagccgtctaggagacggcaacctccaatagtaataagagatgacccggctcggagatgatcaagtgccacactagctctacaatgaagcaaatgcactcgactcttggctaattaaccctcaatcacacctaatggatgaacacaagaactagagagtgtgagagagtgtgcaaggggtgtatgtaagtgaagcaagtaccaagagagttcccttgctgctggtgggggagtatttacactcccaccaactaaaactagtcgttgggggcgaaatcccctaactcagtgtactgccggtcagactgccattgtgtggccagtcagaccggactactatgtaacggctagttttttagccattacagggcaatcaatgagcaattctgaataggccggtcagaccgcagtactgcggccggtcagatcggccacgcctcggtcagaccgacatcggctcggtctgaccagttgcggctctggattggctaccctagagcatagctgccagcctccagggggccggtattggtatttcttaatgacattactaaaagtataattcccagcaatggcgcagaaatactcctagtatattatggttacagaatttatccgcaagcgcacggatataccattgtagcatttcacccgagagtattccaagggtatcgtatttatttaatcccgtgggaagattatagtagagagaaccatactaataacttatatattacttgtaataatcatagtctaagcaggggttaatataatccataaggtagaatgacacacaagcatagaactacttattctcatactaaattgtctaagctaagtggaaagaaagtagaaaagaatctattcctatacttctaatatacatagtatacacacattctagttatatgattaactagctaataccctttttccgatgccctcctagtacttcgagaagccatcccttactgtcgagttcctcacgacagcccgtcatgaccatacaaacagggctaaatacggaggagtaccctctccaggaaagtaacttaggagtatatacacgcgtagaggaataccgtgttgagctgtcaccaacagcggcctacctctcatccgcaacatataaccccaaataatgatatctaataatctagacaccacgcctaaactaccagatactactctaaatcgtcatgacatagaataattgcataagcaaacattatacccgtacctatgcatctcccagataagctagcaatataatcagtataacatgaacataaagtaaaattggcatttatatactcggaaagtatttcaatacaaaaaatgtataaagaagaatattgtaaataaagtacaaagcttacaaaataggaaaggagagatactagatccatacccgaactcttccaaagacttctggactccgatttctattctattcctactccactagcttgcgaatactaaactaaacttgagagaatatgagaaagcttttgcttgaagtgtgtgtagaaatggagagagtgggctccttaaacaggcaggtaatgatggttatggcggttgctaaggtcggtaataccgtccaaccgccataggaaggcaatccacaccgtccagaagaagtcctgcatccaacggcgctgaggggggttcggccgaaccatgggctggcccaatctatcccattttcggctggcggcctcctcctccgttgctcacttcagacttgtgaattttgtcccaattcgtcgtttcaattctgagttcttggcccattcatacataagtctgattctcgacatcgtccgattgatcgatcgtctaatttgatgtcgattcccctccactttatggttattctctgcaaaaggttagtaaatctaatactagtggaatattattattctaactcaaatatgcattgcaaacataactagttctcctctattttgataatattgatggccgaaactgatcgctaacgaccgtcaacagccggtcagaccggggctcacccgacggtcagaccggccactacccgtcagtcagaccggcatttgtgcctcggtcagaccggccctggtcagaaagtctcaaatgaatataaatttagcaagtctaaatgcaaatgacctaatgtggcattttgatcatctctttgtctaggtcattacccctcttaatagtacggcaaagctataaataaactagcacaattttgatcgcccaacttctcgatcaatttaaaatttaaaacactagtttaccgtcttctttcctttgctttgcaccatcaaattttaatcctttggtaatcatccatgcacacatatcacgtggtcctaactcaaaatatataactcaatagaacggttagtccacaattagcgcttgttattaattaccaaaattaaccacgggggcctagattcttcatgactaggggccctcctccggcctctgctctagaccgccgccgtcctcctcaccaccttacgccggctgccgtcctcctcatcagccgccactgagatgggaacagaggcaaagcaggaagaaagagagaggggtgaagagatagagctgaagaggtctaacatgtgggcccacattgaatcattgcttttgacttgggtcaaattgccacatgggacaaaaccaccccactatgttgccatgggacctatattacaccggttttgacgcttgaaggactcgttgtatctggtatttcggttgaaggatgaaaattgaactcgctttcaagttaagggacctaaaatacacttattccattcaaaaatagtattgtactccctccgtctcaaaatacaagggatcctagtccatattcatagtattagtatgtgtcacatccaactcaaatctcttatattttgagatgaagaaagtaataggttactgctccattcgtctacaattaactatttgtgttctaaaataaagctcatgtcccttatctcgatcaatcacaatcattcttcttttaattttttatctactttctattatcaactaatcactactttctaattttcacatatttttttaatgtttgtgcctaacttaaaaaatactaacattttgtgacgggagatatgcgtatgtactattgttgttaatttttaacaaattttcaaaactatttagatagcatgtgagtaaataaatggacattccttgagagattaaaataggttctcaaacaacgattttaccctgtacatcaaaaaatatctcgattagtcgcaagaaagccactgaaatgcatcgatagaagttttgaattgctcaatgttggatccaaatgagtccaagttatttactttcttctctgttaacctgtatcgttacgtttgattggtgtaaatgtttggcgtgtcacatcgggtattatatagggtgttgcatggggtgtttgggcattaataaaaaaaagagtaaattacaccttagaccactttttcttgccattgttgcaatttggaccggggaaaaacaaacattttcactttaaaccacacatctttaccagttgattcagtttaggctagttattgttaccttgtacctcatgctgaccagctccctcttctcgaatgttctctccctccaaggccctctctttgtatctcttctcgtatcaccgaatcaagcgagcggtgagtcggtgaccccatcatgaattgtggcgctgtgaccaactcctattcgaggggttgatgccgtcggggtgaacaaagtactgtatcgcccccaatttgtccatggtttgaccctcatatatagggggatgatgcaggataagcctagccatggtgagagccatctcgtggctgttgcacaaatcggacgctatcgcgcatcacaatgatggtttccttgtagaggacatgctccaacaatatcacatcggctagattaaaacctccctggagttgccgcgctgagagcgttttgaggctgcgtgttcgattccgctgctatccacgtcgctacgcgccaccagccagacggcctgcccaagctccaatttcacgctgctctcggccgtcggatcgcgcgcgaaacgctgtgatgtgctggtatgttatgttaggcattaggcagtgtcccaacgattggtcgacacgtgagcctaggcccctacaactgctggttggttgctgcaccctgtgtggtttgcattagtccatgccatgtgggccctgtgtgtttgggtgctgtgcaacgagtgtatgcagggctgtggagtagggtagtggcctaaaatttcagcgtgttgcgtgacggtctagaagagtgtgcgtgcgtgggcacggtgcatgcgctgccgtagggtgcacggcgtatgacgagtgggtccacgcatcatctatcttcgtgagccaggtgtgcaattactcgacgcctagaaatccacgggtgtatcaaaagcagtgaacgggggtgtacgccactgcctcgttacgtgcggagcatccatggaccagtccgtggttctctgccgctgacatgtgggtccagttatggctctatgggctgcgctagatgcaccgtgaccatgcatccggttcttgcattgagacgtgggttctggaccgggtgaagagggagatcgtgcacacagccaaccatgagacaacacattggtacccatggctgtttgtactgtggaaggcttgtggtgcgctcggcgttgtgagctcggttcacagcattggtttccatgacaggtgggccatgtgcatgtgtcttgaggcggctatgctgtagacaaggtttatacagctaaaagtgatggatttgttgctttcgtgtgcttttagcagccgtggtgtgggtgagaagggagccagagctcttcttaatttgccagctgcttgtgtgttctccttgccgatcccttgcgctagccatcttccgcgaaaaatggccatcgtttggtgtgtgctgacgccttttgctaaatgtttcttgctacgatgtgttctttggaatgtgctcatctctgtcttctctactctgtaggggttttcggttttgttgtgttggtgtggttcttgctgcttgatttgtccgcctgagttagctgacaggatcttgcatgctctagaccaggtatgtcgctggatgtgattcttttagttcacttcggttgttgttacgattcttgatcttattcggtttttggttgtattggatagattttctctattggttccacatcccgcaacctcttctttgctccttgctgtgctgcttctgtctttgaaggtgaggtttgttgcttctgaggttctacattcgtagcctgcttatagcttcttggtttatttctttggtttgttttgcagctcacatttcttcgaagggatttcacgctgtcggctaggctgcgctacaaggtaaagacattgtttctttctgtgccttaccagtgcattgcttccttgcatttgtgtttgtctccgatggtttcttgtgtgcatgtctcctgatgtggtgctgctctatggacccagtttgtttctttgtccttgtgcatatttgttggttgtgctactatagtattatatatatatatatatatatatatatatatatatattaaatgcacagtatatgctccttgctgtgttggtgcgtgtgtgccggtagagcgagaagagtgttggctacaatcttccttctggtcttggcctaccactttctctcttcttaaagccttctagccgttgtgcctgcctcatccttttgtgtcgctctcctctctttgtgctcctcttctctttctctgaaactttcccctgcttactttccttcttttcccgttggtagtattgtaggcaacatgttcgctatcggagtgtcacacgtatctctgctaaatgccgctgctcagcactgcatgctacctagtcttgcctacttgtgggagttcagctttgatggtacgttgttggctggagttgaggtcagcgttccatcagtgtgccactccgatggtttggaaactatgtttttctgggacatggcctcagctccgcttgggactgcacatgaactggtcgctgagcgagcattgaggtacctccagcatcgatatggctttttagtgcacgattacaatttaaactcaatgttggcttacagaagaattgcacagaccgctatacaggttgctttgtcagcctcaggttgtattgcgcattttaggtcctcttatggcccactggcgccgtgttgtgaggatgttcttagaacatgtagctcattgtattttagtttccatgtagaagacatggagcaaatgggttcttttccaatgtaggggaacatgggtttctggggttctgtgtggtttcttgccccattgtaatcctatttgttgtttcttattgttgctttctgttgtgctcatcctacttggtaataatggaatgttcttttttgtacaaatttttggtggttgtataggcattttgtgtgcatgtccaaaagatctgctgatagagtgtccagggtccgtgcaagtcgtgaaaggcgcaatgcacgtaccttggccccccccccccccccaacttgcttgcaaaatgaacttcccctaccaggtgggacaaagagaacacgttcccttatggattttaagcccgctttggcagctttcaataggcaatgacggcgtttgcttttaggaaggagttcttccttagtttcagatgaggacagtgcacatggtatattagctttctcatgggtttatataattatgtgtaatgttgattgtttttctgatagtttagatttggtgcagctagcagtgggtttcatagaggtagttcttcgcggtcacacaaggatcatgctgaggctttaaagggtttgtacatgttcagtccatatatagttggcagttttttaagataagcttatggtagaaatatttggttttctttgtagcatcataccctaggaggtcttattatggtgcaccaacatacgagtgcccatactgtggtgccgtgttttggtaccaggagagagttaagggcgcttctgctatttcaaaacgaaagatagtttacaatctgtgttgcaaaagtggtaaaatacagttgcccaaactatgtaaaccccctgagcctcttgctacactgctaaaatttaatggcgatgcacgctcaaaaagattccttaggcagatacggtcctacaactctatgtttgcttttacttcaatgggtgcagctgttgataaatcaattaacactggaaattcaccttatgtcttcaaaattaacggtgttgttcatcacagaattggtacacttttaccgtcacatggaaagcaacctaaattcgcacaactctatatcttgacccagaaaatgagacacaaaatcgaatgaacatatatgaaaatgatggtagtaacgctgatcaagctgagcctgttgtagttgatgctctctgcactatgctagattgtcataatacacttgtgcaaaaatttcgctacgctagggagcgtctttctgagcatgggaaccatagtttgacgttgaggcttatgggatgcaatgccaaaagtgatgtgcagtacaatttaccaagtagtggcgaactagctgcgattatagtgggtgattactcagcagctgaatacacttttgatatacttgtgcatgagagcgatattgggctgcgacgtgtcttccttgcacccatgttatatggctttgcaatatccattgttttttccttatggcgagcgaggattccatcttggtatcgagtatgctgactatgatggaatcggtagaaaatatgttactgagcttgagttctatcgttacatgattcattataggctaaatgaacctaatccattcacatacattcaaagtgttgtcgatgtattctcaactattgaaagcagtaggttgaaatatatagctgatcatcagtcagacttgcgatctgaatgcgtacaaggtatagctgatgctattgatagaggtataaccaacggtgattctgtaggcaagcgagctatccttcctgctagctttacgggaggtagaaggtatatggtcatgaactatcaagatgcaatggcgttatgtcgtgtttatgggtctcctgatttatttgtcacattcacgtgcaactcaaagtggcaagaaatagttgaatcaatacgatttgaagatggccagctgccatctgatagagctgacatgattgttagggtattcaatatgaaagttcatgattttattactgacatcagggagggtaagacatttgggcctgtgcttgcaggtaatgatgcctattgcaatgtttctacagttagttgtgtagtatagtgtgattacaccctcctaattaaacttggtatttttttttgtcttagttctctacactgttgagttccagaaatgtggtttgccgcacatacactgcttagtatggcttgctgctagcagtgctcaagtatcagtagctgttatagatggatttatcttagctgagataccagactttgaaaccgatgaattaggttatgagtcggtaagcgagttcatgatgcatggtccctgcggtgagcataacaaacaatgtccttgcatgaaaaatggcaaatgttcaaagcactttcctaaagattttcatgatgaaacatttgttgatgaatatggttttacaatctataggcgcagaaatgatgggcgatatatcacaaaaaatggtgtgcgtctagataacagatcagttgtcccatataacattggtttgcttaaaacataccaggcacatataaatgttgagtggtgtaataaatccaacatgattaaatatcgttttaagtatgtgatgaaagtccatgatcgatcaaaaatatattttgaaaccactgctgcaaatggtaatatgtcacctaaccatgaccttgcccctctagatgagatactagaatacatggatgctaggtttttatccacctgtgaggcactgcatagaatttatgaatttgacatacattatagggtttcacctgttgaaaggttggctgtgcatttgcctggtatgaactatgttcgatacgagacagggtcagacttaagagcattgcttaatagtcctgctgcgaaacgtacgatgctgactgagtggtttgaaacaaatgcaaaggatgaggatgcacgtagcctaacatactgtgattttccaacaaaatggacatgggattccacatcgagatcttggcacaaaagaacaccagctcctaaaattggtagaatgtattatgttcatccagctgctggtgaactatactacctatgaatgttgttgatgattgttaagggtgccacaagctatgctgatatacgaacgtataatggtgttacatatgaaacatatagagagacgtttgaggcacggggaatacttgagggagataatgaatggcatcttcttttcgatgaagcagttcagagtgcgtcttcacactagcttaggcagttgtttgttactgttgtgcttttttgctctgttggtgatgttcgtgctttctttgaaaaatattggttgtccatgacagatgacatacaacataggttaaaaaaggcccttgataatccacgttgtattattccgcatgaacacttgcttactctattgatacatgaacttacttataacttaccccaaccaactttctctccacaagtgccctttggtaataggcttattgaagaagaactttcagctgatgcattaatgatgtcgatgcatgcagattccttggttgcacagattaatactgatcaaaaaacaatctttgacaccattgtaggccgagttgtagcagaacagccaggctttttctttgtatgtggtcatggtggtactgggaaaacatttatgtggaatgctttgattgcgaaaataagatctagaaataaaatagttcttgctgtagcttcgtctggtgtggcttctctactgttgccaaaaggaaggactgctcattcacgcttcaaaatacctattgaaattaatgaaaccagtctttgcaatgtaaagagaggaacgatgcttgctgaactacttgaaaacactttgctcatcatctgggatgaagctccaatgacacataggcgttgctttgaagcactagatcgcacactgcgtgatatcctttctgaaacatgcccttcaaatggtgttgttccctttggcggtaaaattgttgtgctaggtggcgactttcgacaaattctaccggttgtgcctaaaggttcacggtcaacaattattgacgcatctattacaaattcaaaactatggaaacatgttgttatgcttaggttgaatgtaaacatgagattgcttaacccttcacttccaaacacacaaaaagaagagcttaagcaatttagcgaatgggttttagccgttggtgatggcactttgcctaaaaaaaaagatggtgagagctatcccacatggatcacaatacctgatgatttgctgattatgacagatggtgacagatggtgagagctatcccacatggatcacaatacctgatgatttgctgattatgacagatggtgataaaatagatgctattgttagagaagtctatcatgatttcctgtcatgttacagagaccctgagtacctagcttcccgtgcgattgtctgtcctagcaattcaattgttgatgaaattaacaactatgttgtaggtttaattccaggagatggaaaagaatacctcagttgtgatacaatctcaaagtgttctgaacaaataccagattttgacatgttatatcccactgaactcctcaactcaattgatgcgaacaattttccaacacatagacttgtacttaaagaaggtgttgcagtcatgcttctttggaatctaaaccaatcaatgggcctttgcaacggaacaaggttattggtagtcgagcttggagagtgtatcttgagatgtatcatactaactggttctaacattggtgaaaccgtgtttatccctaaaatttcactaactactacgaaaatgaaatggccatttacattgcagagaagacaatttcctattcgaatttgctattccatgactatcaacaaaagccaaggccaaacactgcagagagttggtgtctatctaaaaaaacctgtttttacccatggccagttatatgttgccttctcaaggacgacttctcgaccaggcctacgaatattaattgagaatgactatggctcatgtgggatagaaacaaaaaacgtagtttatcatgagattcttgttgctacgttaccagcggtactgcagcctgcagctcttactgtgtacatgctactttagtgcttatgattggtctctcacaactaaacactaataaaatttcaggctgtgccgccacttccctgatacctaaataaatatgcatgcgcacgcagtgcacctttttggggtcttttttgagcattccgctggttatttggacgcagtgcaccgtgtgaagaatgcaaacaggagctacaagccagttgccaatgaactaatgatcactttcactaggtggacaactgttgaggagtgcattgaagttcctattgatttccctactgtggttttctccctgacacctttcgatgatgttgctaagtttgtggacaataatgatttttttattggtgagccatgttagtcttatatttctattggtcttatataatactttactgatcaagtgctaaaatcttcgtatttattcagatgttatgggtgtcattactgacatatctacacccacaatgcttcgtcctagatcaagggatgctgacagcttgaaaagaactattcagatacgcgatgcaaagtattctttatgcctcttattttgttccttgcttatttatttatcctgaccactaacaactaataaaactagcacaaacacagccaatagccactctaataaaatttattgatattcttaacatgtacaccacatttttcctgtttttttacacaaatagcaattctaccttgaatgtgtctctctgggctgaacaagcatctgcgtttgaggctgacgctatacacaaggctggtaagagtgaacctcagattattctgtttgttggaactcttgcgaagaactacccaggcataggtaaccaataaaactacaacataactcatatttgtatcatgcattctaaccaatcaatttaaaattgaaggattggcactatctggaggttctgcttgcaaatggtacattaacattgatgtacctgcgatagttgaattaaaggacaagttagtatagattatattatttcaatgtataactccatatgtcttctacatgtttcctgatatcaatgtaatttacaggactgggacaaacttccagccaatcaattggattgaggctccagccagagcagctgttgaggaagtcgctgagaacaagactgtgcgtgaacttctagagatcaatcctcacaagtgcaaggtaaatgctaattgcgatagatcaaaacaacatgtttgtcttatgctatttagacctgctcttactctgctaattgctccatttgttacagaaggttcgatttcaagctcatgtaaccgttcgaaggatctgcaatgataagtgttggtggtatggttcatgtcaaagatgcttcaaggttgcaaaaccttatgggtccacctataaatgcactagctgttccaacatcgcagtggcagtaccaaggtaaaaaaaactgttaccatttatcttgacattgcaagtgctttccagatcttctcatgcttttctctacgcgaacataacttgcaggtacaggatagtagtcatagctggagatgactctgatgatgctatgtttgttctctttggatgaacagcccagcgcattgtgcgaaggccagttgaagctcttattgaggaagcaccagctgacagtgattttatccctgatgaaataacggctttagttgggaagtcgtttgtgtggaatgtcagcttcacagaaaatacgcttaagtttggggatatctcattccaggtcaacagcattgtctccattgatgctcctggtgaacctcttatgttgatgtccccaggtgcttcccagagttcttcagccatgatttcacctggaccaagtggctcattgatgtcaccatcaaggggaagtgaacttggcatagcttcacccggttcaactgcagccagctctccactgccaaggcgtgttattaccacggacaaaagccaagttgtgcacacaccaaccagcaagtgctctgtcagcatagatcaggatgacatttctgctgctttttctccaccaatgtcccaggtagtgactgataagttattattttgctacttctatagtctcctacacatttatggtcttgcttattgatcatgatagcaaactaataaaattctttgcagaaagtgcaagctccagctattcctgatgatgatacactactggctcatgcatctggctcaaagagcaagtctaggaagaggtagattgttttttttttttcatttgacatgtggttcttcattttttttttaaaaaaaattgctttcctaaaacatggtctgatgttaacagaggtcctccttctcaagcaccaccagcagttaagaaactattcaaggaaggtgacagcgatgagaaagaaaccactgttaggtatattcactggtttagcttggctgctatttgtgcatacagtatataattcattcttcttgcagcctgtcagctgacgcttgatccagtatacatgcatgcccactcaagcattttggccaccaagttgtagcatcttcgtctgcctgaaccgaagcgcatggaagaatgctgtctttgccatatgtctgaaccttttgctataaactgttgatctccagctattacttcttagtgactttcgaaattattgttcccatctcttttggaaccatctttagcaatgtttgtaagcttattatggttacattagctatagtccaaccacgtgctcaaagtccattacagttgccaatatgtcagtacggcaatggactttgaacagttggcattggcttagctccatgataccttctcaggtttcgcttagtaatgttagaccaatcttaagactcatccatgtttcttgagtccatctcctcatttcttattatgtcgcatgcatggcattggcattttaatttgttgcgataactaggttgtagcccgtgcgtttcctgtcatcataacttctctgcttttttatgttgtttgcctgatggtagggcgcgcaaagcgcgccttattacctagtataaattcacggcgcggtagttgagctcgagctatacctccacatggtaatggggaatttcttttgccattttcttctttatttctgtcaagtgcaaccagggtgcggaggccatttcaagcacatggcgttgaagctggtgccggcggagctcccgtgcaagcacggcactggcgagtggctcactttgtagtggtggttcttcctgcccatgagtggagagagaaagagaggagagagggggagctatagaggtagaagaaacagtccaaactaaaacaaccagtgaagataggtagtctaaagtgaacaagtttgttcacccctagtccaaattgcaacattggtaaaaaagagtggcccaagatgtaatttactcaaaaaaataattacagaatctactaatctcaagctggccattctgccagcattctattgcttcaaatggcactgtaatttaattatacgtggagcaacgagataaaagacatgctgtgcacagcgatctgatgtactgtctcgcaactcgcaagtatatctttctggatctctcaaaaaaatgcttctaatcgcccgtccggtgggaagccaaatatcggacgcatcgctgctgctgccggggctcacacgctgcctgttgtgccgcccacgtctctctcacgcgcgcagagtcctcatgctgccacgtatccccaccacatattccgttgcaataaatcacctacatattttggaaaaccctcttttaagggaatctgtttttttttccactaaaaatgttacacctagtgtactcacaatgtttcactatgtatagatctaatgttgcaatgaattgaaacattcttttgcaacaaatcacccatatattatggaaaccctttattaagggaactcgtttcattttttgttccacaaaaaatgtttcacctagtgtattgataatatttcactatgtatggatcaaatgttatagtgaattaaaacatcctttcgctattcgctgaaacattattttcatataaggtgaaacagtgtctgatgaaatattttcgatctagttagttaaacaattccgatatacttggtgcaacagcgtgtaacatttaaaaataattcaataataagctcaatttttttcattggattatatccatgtgtggtcttgttttaaagatttaattgcaatggatttaatagtgcaatcagatcatgatttggataaataatttaagagaaaaaatagtttaaagttcgcttagatgcatacatgcaggatgacatcatgatgacatgggtgcccgatttttctaaaaaaaatgggacttccgatttgtagctctctccggatctcttgcatatgcgcacccagccgcagtgcatgcatgtgcattaataattagaatttaacattaatatcatttaaaatctaagacaagatacatctcaaaagaaaaccaattatttaaatattaaataattaaattaaatatataaaaagagtagcaagtattgaaaacaattaaaaatgaaaaaaatgtgctaatccacaaattttactttttttaaggtaagtcagttgaaaaatgttccaataaatatgataagtgacattgtttaaattcaaaataggtaacttaaccaagttgatatcccatatctttaactattataaaaattcaacatgtttttatcaacaatttcgtacgtcgcccatacgattcgcacgcgtattttcctgtgttgtccgactcttgatcaaggcgcacgaatttttgctgtgaaaatctcttttctgtttgattcccttactagataacatccgtatttttcacacgtcaggatataggcctacgtagcttccattcaggcctaggcccactaatccaatttgtttgcaccaaaaacagatacaagcatgatctactgacgagaacccctttgagcggctaaaaaacatcttcgggaaaaattaactcctattatatatatatctatatacctaatttatatctatacctaataaaaaaaatgtaataacatctcccaggccgcgccgtgcctcggcccctcctcctccttcgtcggaagccgtcgggccgccgtccatgtcgcctccccgaggagcccgctgctgccaccacttgctgccgtgcccttttggccgccgcccctcgccagcgccccatggtgaggaccccctccctctcccatcccttccgctgctccgcgcgctgccactcaccgccggtgtcgccgctggtggccgtccggctacacgccgccgccgcctagtcgagttggccggcgagccaacccgcccctctgccacgcaccactaccgtggactcggtctacagtggaccaaatcctttgacccgctgatgtgtggggcccgccctttgtggacttggtccgcgcctctctccttgttgcggcagcaaatgccttttcctttgtaaaattaattaataattacgcaataaatcaataataattctagaaattcatttaaatggctcaaaacttctaaaattcatatctaattcatacgaactccgaattgagccattcaacttgcaaaattcatctaaaattgagatatacatgtttgtttactttttatgttatttgtttttctagtccgttagtaaaccgcgagacaaatttattaagcctaattaatccgtcattagcaaatgtttactgcagcaccatattgtcaaatcatatagcaattatgcttaaaagattcatctcgcaaattagtcacaatttgtgtaattagttactttatacatgtgttcaaacgttcgatgtgaaaagatgtaaaattttggggtgggatagccttactaatactaccacatgtgtttctcactctacttttcggagttgcactgctcagccgcgcggcggcgcgggtgttgggtggacttcgacgcgcgcacctcgcttgtcaacgtcaccatggctcccctcgagctgcccaaaccgaggacgccgctgctctccgccgccgtgaacctctcggccgtgatagaagacgaagcctacgtcggcttctcctcgtccaccggcgtcgtcgcgagccgcgcgccactacgtgcttgcctggagcttcaagatggacgggccagcaccatcgctaaacgtatcaaacctgccggcgttgcctgtcacgatcggcagggctccgtccaacgttctgaagatactattgccgatagcctcgatcggctgttctcgtcattcaccggagacgacgtaggtatgcggagcttaaagaggattgggaggttgcgtttgggccactggttctcatacaaggatatgttccgtgccaccaatggtttctcttatgagcgattgcttggctttggaggatttggaagggtgtacaaggtgagtgcttctggtatcccgagtggagattgccgtgaaggtgtcccttgaatcctctccctacacccattactgccccctcaatggtgaatccttccacctcacctgcacctgcggcatacccgctgccgacgacttcaacctctcctccttctgcatcattgacaaacccaacatcaaacccaatgacgcctgctatcagcatgccacctcctgctctcaccacaactccacccactgccccaggtctttccgggcagcaactatggtgtgtggccaaggctgactcagcagatactgcacttaagaatgcactggactaagcgtgcggcattggaggagcagattgcttagcaatacaaccatcaggcacttgttattatccaaataccttaggtgcacatgcatcctatcactaccggagaagtgatctttgcctggtggaaaaaaaccacaatagtcccagttccaaaaactatctttagccccggttaaaaatctcacaaccattatatgatctttagtcccgattggtaacaacaaccgggactaaagatggttcatcccctgtcagcctgtcagggtgctaatgatctttagtcccgattggtgcaccaaccgggactaaagatcactattttaatcccggttggtatttctaaccggcactaaagattaagatgatcattagtcccggttggtattaccaaccgggattaaaatttaatgcgtagtatataatcactctcccttattctctcaaccacacttatcctctcaacccacagatccggccccttctcttcttcctcctccccttcctcctccctcccacagatcccctctcctcccctcttcctccctttccatccggcgggcaggcggccggcggccagtggggccacgcccggcggcagcggccggcggggccgcgcgctgcagcggcgggaaggcggccggcaggcccgcgcacggcggcggggccacaggcggcgggcgccggcgggcatggggccggcggccggtggggcagcatcggcgccctctcctcctttcttttttttttcatataatttgtgattcactaagatgtataatttggtgattcattgcattgatctgatttgtgatgtatttgatttggaacacaacagtcttaatttgtgattcacttgtgatgtatttgatttgtgtgtataaataacttaaagatttgggatgtgaatgatttgggatgtcacttttgatttggggatttagggtttgatttgggaatatgcatcccactggatttgggagaaaatacagggattaaagaaaaagaaaaggggacgaaggaccgccgctattctctctttagtcctaaagatctatttttagtcccggttatttcaaccgggactaaaaatgggtatctttagtcccagattcctcgtcccgattgcataaccggggaaaaaaaaacagttgccacccggtggcaaagatcagttgtgcagcagtgtacgctttcaacagctattaccagaggagccctgcaccctccagctgcgatttttgggggacgacaatgcttgtcaatgtgaatcccagtaaggatgaatctcctctcatttcaatgtcattatgtttgtgttgtaaagatcattttatgtgtgtatatttcctttgcaggctcaggaagctgtgttttggcatcgtcaatgtcgttaccatcaaggtgaaaatcatttcaactctgaaaaggaattgtgatggtagggtttttggaaggaacagtgatgattattggtgctgggtttgtagatgggactgtgattggcatcgttggattagttgcctgttcatcgtgggcagtttgtttgcctgcagttttaactaacaaatagttaattagtcattgagtgtcatcattagcaaaccaaaggcttttattatgtcctgattaagctcaggtcagccttctaaaagatgtactagtacttaatcaaagagtagtcgtttttttttaaaaaaaacaggacacaatttgtaatatccatgagtaggaaacggtcgtgattcaggcaattaaaaaggactaatgatccattaggtgggatgtgggattgaacatagataaactagttggcagcccgcgtatttgccgcgggttttatagttttatcgtcaaacaaaatcataaaaatggttaggtgtaactctatgtatatacaaaatatatgataatatggatttatatatgtcttatgttattacaatacaatttagctttattttttcaaacatcattgtgtattgttataatatatgaatattattttcatatgcaatatgggtttcgttatagttagacaatttacatttctctacttcactcaagttttttctgaaaatagattcaggtaacgatacctaataattatatgctattttgtcatgcgtaataaaaaaaacatacatattaaacaataatcacataataaacaataatttgagtagtatttggaaaacatggtgttatgcacaaaatatataacagtgctatgtgtgacagtgaggtagagcaaagggaggtgaatggataactaataaatgattgaattggatgaataagtggcttcttgatccaatggttattatctttatactaatattttatactaatatgatcaaatggcttaaaatttttgatgacgtagcttcttacatgtcttactttataggaataaatgcccctagtgtgtaccaactatatagaaagataggattagatttcctttccatgctcttgtaatattctactagtagtaagaaaagagacgaaatagcgttatgtcgtggttcccccattccattggatggtgtattatcaaatttctcggtccaaagaacaagaccaaattgttaatttggtcaagtccaatccctcgtcacgctaagctcttgcaaccaaacaggaatgtacaagtcgaaatacctctaaaactggtgtaggattaaaggaatgatgaaaaaccgtagtcatatgctagccaaatggaggagcaaacgcggtgcattagggagctagagggaaggaaaagggaaaaacatgggaacagaaaggaagatctggccttgtggacgccagcagcaactatacaacactttgatagttcatacacagtgaactgaactgaaggtgcagatggaagcagaggaataagcacacagacctgagcagcagggaagcgcgcgggagaggatgcaggagcaggagaggaggaggaggaagaggaagaggaagaggaagaagaagatatcctatctcctggccatagttgtgctgtgttgctgggaagctcaagaaatgcgatttgggagtggagaaagggacataggggagtggggaactggcgatatgactagagagataatgcgtgcttgctaccgttgcttgcccttttggctagggaaagtgcaaatggttggtctgaatttaactatttaccacttttagattggacaattattcaaatatccattttaggtttgcacatattctttttgctctcttaagagatgtcttcttaacaatttgccacttttacccacatggcatgccaacatggcaagggagggtagaaactggtgtgggacctactagttagcctctcctctctccttcttctctccctccggcccgatgtggcgctgccatgatggtgtagcggcgacatatgaggaggagcagcggcggacagagctccttgcggtggtggaggacgcagagcggcggtgccggcagagaggaggcgtagcggcggcggacaggcttcttgcggaggcggtgaggcggagcggcggctatcggcggaggaggaggtgtagcaacggcactggcggaggaggcatagcagcggcggcactggtggaggaggcatagcggtggcggacgaacgccagtgaaggaggcgtagtggcggcgaacagcctcctcacggcggcagcgccggcgaaggaggcgtagcggcggtggtgggcgtggtggggctaacggagactgaggtggcgacgccacgccggagtccggaccggagggagagaaggagagaggagaggctgactagtgggccccacatcgggttttactctccgttgccatgttggcatgtgttgatgcaaaaaatacacactggcctgagagatctgcttagctctagtgcaggtccaaagaaattgctttcgggttctgagcgtgccaattggtttgatcctgcaactaacaagaaacaaagaaaagcaaagttaaatctatcaacgatagctgatcggctggattgccgatgacgtatcgttcagtattaagccgatataacatgtatcagatcagcaataaggaatataacaaagaaagagttagatctacttgatcggctgtagatatctatcacgaccggaaataacccaacgggcgttccttacgtgcgtgtattattccttgtcccaggaggcaaggtacaccgaaagttgatacatttcagagtttatcaagcggaagcataaatagttactttattacatgggcggcgaaggcccagcacacaagaagacaaacgggaaacagcagaagactagggcgacgaccacaggcgcttgacggcaggcacgagctaaacaccaaagacttcatcatccaggggctcctcttctgggtttgggaaaaattgagcaagactgagtacaaccaccgtactcaacaagacacacccataagtgcagaataaatgcaagggagtacaagggggttataatataaagggttagggtttgcaataaacagcattaaaagacacttagttgctcaaagctattttgtaaatacgatcctagagttatacaagattattaatcaaggccgtgaacccacacgaacctgccttaacccaaggcctacgatgattcagaccgaactggcaacctgaccctgggtcccagctcgtcccaagccaacccaggccaaccattccacattttagtggttaagcaggttttaagaattaaaacactaacttgggtacattgctcggcttgcccataactgagggcgcggctattcgaataggttatactctgatcagaggtgtacatctttacccacaagacacatcttcgtcacgtgtaaccacgtgccacataccaccaccgtatacggacggaagacgtgacatagtttccaacccattctagccatagacaagagtaccgacccaaccccacctacggccggaacctccgggacaggtaggcaggactgagcccctagcagcaggacaccggccctgtgccatgacatctcgactactgggccgtagctcgtgtagccttcatttgccctagagatgtccatcgacccccgacttcgtccacctccatccgtgtacttttgtttataaccagactgagccacaaactaagccttacccactagacatgtggaagtacggtagtgctttgcaacagaggcccgaagaccggtccttatatggccgaggtgctactatcaaaaccatgcaccccgagcctagcctaaaaccattttgaggattttgaatagagggggaggtgtgaatccaattccacaataatccaaccattccatagtgttcaggtgatatgaatattcccaaagtctagagttgtaaaaccacctaatgttacctaattaagcagcgaagcatctacctaaattcatactagtggtaccatgagtagagtgtccactagttggggttttgtttattctagggtgaacaaggtaataataataataacaataataataaggtcataacaaaggtaaataggcatggctaaataaaacagtgataacgcgggaatttaaataaagcgataatgtaataatttaaatcaaaataattttataaactgggattcaatatgttcaaggatgatgtgacttgccttgctcactttcccaaacgtcggcttcaacctccacgaagagcggatcttccgaagctgcacgaccaacggaaaagaaaagggcttttactctaataaactccacataaccagcaagaacaaagcacaaaaatgggttcttgacttcttaaggaaaaattagagacttgaacggtccaattccgagttcaaatggccaagttatggccatttgaagtttatattctctttaaatgaatatttgcgaatttattcatttaaattttaatttaaaaaggggtttattgcgtcagccgaggggaaggggcgcgcggaccgggtccacgggagtggggcccacgcggcagcctcacggtccacggtggaccgggtgcacccgggctcacaccggccggcgccgtgggttccacgcgtcagccgcacccgagggcgcgggcggctgacgaccgggccccacgcggcagccactcggcgcgcccgaaggcggccactcggtgcggctggcaggaggcggcgcccgcgcccctatggtcgccggtggcggccataggcacggcggagcggcggccgagagaggggaagggaagggggaaaagaggcggcagtccacggctcaccctaggtcaacggcgacgatgaaaaaggcggccggagcggaggaaggtggcggcgcggctcgggtcgacggggtcgacggcgttccggcggtcggcgaactcggcgagggggtggacggggtcgacggtggtgcggcgaagccggggcgggagacggtcccggcgagcggagaaggccggccggaggtcgtcggcgacggaggagagagagagagagcgacgacgcgagctcgattccggcaaggaggaagggcggcgagaggcggaaacggacggaggaggtgcggggagggtttaaatagggttggaagggggagagggcggccggaggggaaggaaaccagcgcggcgttctcgggctccatcaatggcgccggcgggattaagggagggtttccaaacgaatccaagggagagagggaaggaaaattggggggaaagggagagggaatcacggggaataattcccccctattgattgcacgcggggacgacgggatgcggcggattcggcggcggcggcggcgcttggcgcgggtggagcggcgggaggtcagggatgacgggtgggccccacccgttagtgagggtggcgggcgggcccgcccgtcagcggcgcgcgcgcggggaggggccgagtgggccgcggggagaggagagagagggggagggagaagggccgagccggcccaagagggggaggggggaattttaaggtttttctttttataaaatcattttaactttgtttatttcttcttaattattatttgtgctctgaaaattccactaaaatttatttacacattttaggcttttaggaaatatacaaaaatcctccaagccttatttgacttttaactttgcacattttaatttttggaggctttcacacggattttaattattctaggcataatttagaggatgtattttagagttgttttgggacgtgacaatatcaatgatatacgatctatgtttcgaaataagtttaaactaagtgattgggatagatcgaacgggatgctgagacagtataaatcacttatgtctaaaagtacttcaaaataaagattgtatatactcatagcatagccgataaagcaaacctatcatgtatcggctagtactccgataccactttatactaaaatatcaatatagacgtaatataccaaacataaatcaatctaacatcaggaaaaacctaatggatcaatagcaagcttgatatattctatctaagtgagatctcaatataaagggcagatttagcatatcaaataaacatataagaatcaagataactaaatcagataagatcggctgaaactccgatgctatctctattagcaatcatcaaacaggctagattttatagttctaaatattactcaacagatcaaacttaactgatgcagcaataagcataagaagaaacataaaatctaaacgagtctatgaaagctttttcaagatggtggatatactatataatttaattcaatatcagtatccaatcctatcggttgttttcgttgatagaagccggccgatgtggttagatagcaagatcgatctagattatatagcatatatgataactcgacgatttacataaacaagattagagtgtcatgaagatgtaatcactagtcccgagaacgcaagccaccataacaagttttaccttttcgtcggagatcgaacccgatgcagcccaactcgaaagcaagaactcgtgaaaacaatgaaagtagaaaaaggtggcgatgcaccgaaagtattattgaactatcgtcctttgtttacatggtctcgggtcatatttatacccaaaatacatgatatgtccttgccggacatgactctatctttattacaactcaaaatacgaataagtcccttaggcggactcttaccaaaaatatctctaagaaaactaccagaatatcttacaactcaaaatacgaataattcccttaggcggactcttaccgaaaatatctctaagaaaactatcagaatatcctaattaataaatagaattgccttcttaggactcaatccatgtgtggcaacacttgtgcagcacctcaatcgaccctaacaatgattctagaatcaccttgccgaaatcggctatatcgacttctcccaaacagcagccgatgcaaacagcagcagatgcaactcgtagccgatgcaaactctgtttcctagactaccaatttcctctaaatccgcttcagatttatccccaaatccaatctgtgatttaccaaatttggtcgttaaaagcatgccacgtgggcaaaagtggcaaatagttaagaagacatctcttcagattggaaaaaaaatatgtgcaaagctaaaaggggcatttggataattgtccaatctaaaagtggcaaatagttaaatttcccctgctctgcagtctccactctggactggagttgcagccttgcatgccttcaaggcaggattgtttttaaaaaatatgttattatttcaccggttttgtatgaatacacatgattgaaaagaattaggaaaggcagagcgcaccatcgctccacggggacgcgaactcgctggcctcagatttttcttttatattttagatcatttaaacaaataattttaataatagactttacaggaaattattttcaaaaatgaacattttcgccacgctagccgcgatggcgtgaccaaactgagctgccgtgccagtcgttgccgttgacaaggttaatcggggccgacgtggcagggggcggctgggcttgctatgccaagctcggtggcgaacaccgccacgccatctcgcctggcgtggtggggggggaaatataccccagtcactgccgccgcccctttcttcctccttcctcgcttcttctcctccccgttgttctctctcctagcgatgaagaaaccggcgccccctccccaaatccatccaaatccactcaaaatcctgtgtttttgctccgatttgaagctcttttgagtgggaacccatcccgtaaggtattcgttttctctcgtttttgcatctattgtaatgtttagggttgaatgtaatgtgactgaaatatgtaataatgaggttcacggggatggatcgaagtagattgaggtgtattatggagtagtactcgattctgttagggttatttacgtggaaaatatggtttttttatgatatggttaaaagtggggttagacatgggatagcacgaacatgatatttttaagtatttgtgattatgtagcatgttgtgcttatgttggtctagaaatagttgtattccgccattgtattgttccctaactagtgctaattgtgaatatttaatattcgccgtcgttaattcatcgccacagacaaacccgttgttggtatttcttacgatcacagatagaatccgcaagtgcacagatataccgatgtagcacttcccctacggagtattccaagggtatcgaatccaaggaaacgtgtgtgattatctctttctctagttcatccaaggacacaagataaatataggtaaagggaaaagaggattttctagtgagaaacaatgtctaaggaaagcttaagtttaatcctaacgcgatacttcaggcattggcaacccgctcttcccagatgtcgctctactacgtacccggacagggaggacttaagtactcttgagggctgtcaccacctctacacctacctctaacatactgtgggatacgcagcaaccactgaaaattaagtacccagacaccgcgtctacgcaattaataactactctagtgctagctaaacactaaagcaatcactatataatttatggactatagtaaacaatgatcccgtatgctaattaggaactaaccaagaataattctcacgaagcaaatcttaattactcagaatgatatttttattgaaccagagtaaataacaaagtacaagaataaggagaggattaccgacaactccgggattcctccaacttcttctactttactctctctctctctattctaagtatactatagaacatataaagaagctaaagtatacttagagcctcttataattcagctctacatcttggtgtgtattgtgaatgagggagagaggagtatttataggtggagagatgccttgggaatgtggagatgctaagcatctaaatggcatcttcactctcctcttgccatgtgtctagctgatgacggttattcaggtaaagtcggtagaaaccgtcataacaagtcggcaactgacggcatgtgaagtttagggccgaatggcgcagctacgggttcggccaaacccttgctggcccgttttgctccgaattttctcgtgggctttggtggagaacccctcagcccaaatgtagttgcatttggcccatttgaatgagtttcattcggtttgtgggtccaaaactccataagcttgaatatggaagtttaattcacctcctcctctatgtatcttttgtctcaactttggtggttcgtcacctgcatctaaatatacaccaacactcatggaaatggttagaaataagccttatcactatgttggatgttttatatttagggtcttatgctggtattgacggcgttaatttggtacttaacaaccgtcaacacctgtatcattcctcaatgtgacgatttagctttattttcgtatgctcctaatggtttctgctattgtatggttcacgaatcgaacattaatggatctattttatttttattaataaagttgcatccacgtcctactgcattttcttccttctacttgcgttcttattcctccatcctatcacgatattgctccaactagcattcaggtgattgctttttgtggtgccggatttagtcatttccatctttccaaattgaagcgaaaacaaggaataaggaattgacaatgcttgaaccattcatatcttcaacagataaatcaagtccatcaaaaccgcacgaagttttctaggaatacctcacaaatactacagatactttatccgatctttagtaccaattttctaaatacaaacttggcatgttcaccataaacaagcaattgtcatgatattaataaaaatattcctaacacatgaaattttcttatcataatttttttcttcagaaacataaaatagctgggctttttgcactgccacaccaacaagccgggcatggaagtagccacgtcagcgcccgattgaccttttcaacggcaacgactaccatgaggcaatttttgccacgccataaccaatggcatggctgttggtatttcttacgacattactagaaacataatttccagcaattgtgcagaaatactcttggtatattatggttacaaagttcatccacaagcgcacggatataccattgtagcatttcacccgaaagtattccaagggtatcgtatttgtttaatcctgtaggaagattatagtagagagaatctgactaataatttatatgttacttgtaataatcatagtctaagcaagggttaagataatccaagggtagagtgacacacaagcaggaagctactcattctcatactaaaatatctatgctaagtggaaagaaaagagaaagagaatctattcctataattctagtatacatagtatacatgcatcatagttatctgacatactagctaataccctctatctgatgccctcctggtacttcgagaagccacccctgactaccgagttccttacgacaacccgttatgaccatacaaccggggctaaatacggaggagtaccctccccaggaaattaacttaggactatatacacgcgcggaggaatacccgtactgagctgtcaccatcagaggcccacctctcattcgtagcacataaccccaaataatgatatctcgtaatctagacaccacacctaaactaccagatactactctaatatcatcgtcatgacatagagtaattgcataagcaaacactatacccgtaccgatgcatctcccagataagctagcagtataatcagtataacatgaacataatgtaaagttgacattcatatactcagaaagtattccaataccataaatgtatatagaagagtattctaaataaagtacagagcttacaaaagagaagagaagagctactagaggcatacccgaactcttccgaattcttccacactccgatttctactctatttctactccactagcttgagaacactaaactaaacttgagagaatatgagagagctttgcttgaggggtgtgtgtgaagtgaggatgagagcaccttttatagcttgagaatgacggttgtgacggttggaaaggtcggtaatactcaccaatcgtcattggggagtcatctcagccgtccaggagaaccctggattaagtggcgctgcgagggggggagggggttcggccgaaccaagggctgggccgacctggcccaaaatcggcaggtggcctcctcctttgctctcatatgtagacttgtgaattttggcccagttcatcgtgtcaattctgagttattggcccattcatacataagtttgattctcgacatcatccgattgatttattatctggtttgatgtcgattttcatccactttatagttattctctgcaaaaggttagtaaaccaaatgctagtggaatattatgattctaacatgaatatgcattgcaagcataactagttctcctctattttggtaatattgacggtcaaaactaatcgctaacgactgtcaacagtggcgaaaaggttcatttttaaaaataagttcctaggaggtctattattaaatttatttattttaaaggtctaaaacataaaaaaaaatctggccccgcgtgagtttgcttggctgaacagcgaaatgcctactaaattgttgacgatgaattagcggttaattaaatgctaataacaatagaaataaccaccaattaattaatttctagtgatgctaattaattatttaatcatgcgatctgcagtgccgtgagttcgcatccacccatttttctccatgcgaagtcgcgccctagtcgcacgaactcgtgatgatatcatgaacacattatgagttcacgcactcaccgtacaaactcgctgcgtgtaacatcctggcctaattaggatttggcatgtgtggcgcatgagagttgggtgctcatgtttagtaccaccttgtttagcaatgttggaaccaatttataaggtcttttctctccaactatattactctcaggttaactattttacatgaagcgaggatgaaagtgtatataagtgggtggtatatgtaagtgggtccacctgtcggatgggctagctacgtggttatagagggaggggctgagattcacacccctctgcgacaatggtatacacttttttaactttgttcttcaaggcagcaggtgtctgcctaaaagcatagagtagagcagtagtttttaataatcacttcagcggacggccactcatttatcatatatcaactaataatgtagggtttagggtttataaaaaaatcaaaaaaatgatacggtagactaatatgtaatatattgctcaacaaacaagtacaaattgtaataaaaataataattttgactgcgaatatgcatataccaattaaagtttattttgttatttttgttgtaacatgtagaaatcgaatttgactttaaatgtttatggactgatataaaaaaattttcataactatttagttgacatgcgataaaagagtggacgtccacccaaatgattagaatccctctccgctctcagggtccatgtttcgaaggggaaaagtaaaaaccggtaaaattttgagatttcaagacgggacataatcatgtttcgaagcaaattttaaatatattttgagaaattaaaatttaaaatagtaaattttaacaaaattccattggaatttgttaaaaattgatggaaattgatgtaccaccagggtcagtatccggccatccatgggaaaggtaaactctcatactgctagagaatgctaggggtagagatacgatgctgcggttttggtcatttttgtttattcacttttactatgctaatattatatggacttagaaattttatgggtgtgttttgaaacattagaaaatttatggacttttatagcaattggtttaatttttatagaattagaagaattcccatgatccaatgagcccttaatactttacgattttcatgacaccccacttgtccacaatattttgcctttgctttactagtatgagatattacggcatatcaatcctacttttaatcgtacacacttcttaatacgagtacactagtccaaaagttcaagtaaatacacatggaaaaagatacttcctccgtttcacaatgtaagtcaattctagcacttcccacattcatattgatactaatgaatatagatagatatatatgtctgtctagattcattagcatcaatataaatttgggaaatgctagaatgacttacattgtgaaacagagggagtatgtatctattacatgtcgtccatgcaaatgtgtgatagttaaaaaagaaaaaaaaataagggaaagctctatatctatctcttaattagagtaaaaaaaatatctttacaacatgaaaaatgggtgttttgtaaaattttaggaatttaacatgtttgagtatagaattatgattatcccttggatttcttggtacacctttttctcaacccttcctaactttctaaactagtaaattttagaaaaccctatattttattgtcagtgttgtagaaaaccactggtatggtcacttgtcgcatataaccacaggttttatggtctaaattttgtaaaaccccatctttatttaaatcttgattaatttaaccatatctgaaacgatatctttcaaagtagcaaacagttaaactatcaaccttagtcaagaactcaataattaaaaacaattcaaatacactatgttttaaagtgcatagagtaaggtttgtgaaactttacaaccataatacctagggttatgtgccactggtcataatatctagggttttatgcaactttgaaataaaacatggggtttgctaagttttactccttttaaatttatctgtttctttttctcatcaaatgattggaccaaaggttcatgaacaactttctaaatactagctaatgcccgtgctttgctacggataaaatgaaaaatatcacaatattttctaaaataaataaatcatatttttcatgaaatgtgttacccacatttttcctataggaaatagggctatccatttagatttagttgttatgtaatattaagaactaggagaggtggtaggttcaatgccacaccattggagtgagtatagaatcttggtgtgcccaattgtatatttatgtatatgtgccaaaggaatgaagcatgtcatatgccacttgtatgctatttatcgcctttggaagttgagcttggagatgctgagaccaaaaaggatggcaaacaggatgggaaacatggccaaaattatggctgctagtggcagtaggtcatggcggaaaccgaagtaatccttaatgaaggcggccacagatttagtctctccaaatacagaaatctccttctgatgctcatccccaaattgtgtggtaaagaaaacgttgagtgtccacgacaatggggaagtgtagtacaaccatatccaccatcttggaatttgctgccatatcagtaaaccatatatttatgcattttgtaatgctatgtatacatacttacattattaagcaataattattcaggtgagatgatggttttgcttactggtgcaggcacgatgaagccagacatgaggttctgcagggtgtagaacatggatgccaatatagatgccacttggatatttggggtgagtgacactatcatcattccaaagtagaggaagtacagcagcgtgcacgctatggtgtacatgaaccaaaagaacttagctgcagtccatgcataccctatcatgggataagctatgaacatgatcaacaatatttgcaccaacacataagggatctccattgcaacctactccagccagccccaagatgcaaaatgaataacaaatagaaagtcatattaagcccaagcataatacaactaagtcttttacatataaggttaaggtcttgaggacataagatacctgtgccaaggagtaggcccaaggagagtacattcctgcaaacctctccctataaacgacagagcgctcaatggatatgaacggtatcaccgattggcagttattgatgccagtaaaaagagtggtgccgtacatgcaccctagtatggtgaataggccttgttggtcatttctacccaccaaggaaacaaaaaaagaaatgaaaaaaggatcaatgcaaatcatatcaatcatatgcatatgaacatgcttcctctatatctatttacaaggatggacatagtgatggttcacaatacatacatgtggttgatgtcaccttgctgccagaacaatacaccgaagacaatgcaggagattgttatgaataaaattcgcactaggttgtaggaaggacttctccaatatgacaaacactgcttccagatgcaagcctttagttgctccctaaacttctgtggaaaccgtgttgggaaatggagatcactcgtgcctagagctggtttgctcaaactcttcactagagcatccttgtcccttcaataaccaattacttaccatcataccaagtttgtttttcccacaggtaagagtattgttaattacaagtggcgtgatgacacacgtaagtatcatttggtcaattattttatcaagaccactcttggcacccaagccccattgcattttatgtgtaacttgttttggatatataaatggcactagatccaaatgtgatgggtttttaaaaacttacttgcacatggttgattccctgtaaatttgggcaaaatctacccccaattgagcttccatagatgcacaagtaacttcgagcatccatgttgatgggttgtaattatccttgatcttgggtaccccgggaattgtctgaaaaatcaaagagaaaaggttaggtactcctcccttttcaaaagggtggctctttgctttcatatcttatcttttggcaatgtactggggtttatcccctaaactctgttcttgcttaataatatgtttgtgtgttaaaaaaaagatatattcttattctacggttcaaaagaagtgtgtttatgattatattgcacgtcccatcatctactacagacattagaaatcatgacatccagagaataaatttttaatgacacgtaatatatatgtaatgtacaatgtacattggaaatagtgatgcttggagaagggaattgtaagaataatgtgacataaataaattaattattgaaaatacaaaaaaacatatatttatcaaggaaatcaaaatatccacattgcttgcttcatcatatgcaatgtacattggaaatgcaacatctggagaatggatttatacgaataacgcgctctacatatacaatacccaattatatatatacgtagagagagttgagggtgatgatatgttcttcacccacgcccatttaaaaacctttatggctgtaaatatgtaggaatatgtgtattgttgtaaaacttttgtaggaaagtattgcatctttgcatatgtacatacatttctggtcaacttgcctcataattatgcacacatgttaaggatttaatggaatataattttgtagtttagacttaatatatattagtttggatccgttaattatagcacatgcacatgatgctagatagaaaataatggactggaaatgcagacaaaaatcataactagtgattagtttgtaacttcttaaaaacatataggtcatgaaaataatgaaatcagatgtagctagctaggtcaactttaattggttttcatcacataatatgaatggtgatacgaaacaaattttatttatagctagatacttttgtacaagcaatatacaatgaacaagttcaagttattaattgatacctcgaaatagtggatgacgttacatgaatggagtccaagaggcccagcatatatcaactctccaccccttttcattagcataagctaaatacatatttaagataattagttataaggtacttcacttttattttactcatgcaaactaaagaattttaatatcactaatgcacattaaatatacacaaaatatctcccgttattattgaaaaaaatatggaaatttcatgcttaacttctccaacaccatgaatgcttaaaaaggttacagttgtatgctcttagcccagtaaattaagccgtaaagatctatgtactatagcaaattaagaaacttttggtaatgaagacatgtagagttatcaacatgatgtttttgtctagaaaagtaaatgaatactccatagaagttgtaacttgaaatacccctatattgtaatcatgttacatgtattgttgacgtagtaagtttacgtacaaatatgtatcattatttttttcttcatatctaatatagtaatagagggtgtgtgtagttgaacaagtctgctaaaattcctatgaataattaatgtaatgtatgaccactttaaagcgtattttttattccatgagagctatcctttacacttcatagttagtcctagataagactattgagctatatatgtaacacaataacttgaaagtacctcatcaaaggcctcaaatatttcaatacttggttggtgaatggtgcacacaactgttcgacctgtgtctgcgacattcttcaccgcacgcatgacaatagcagctgctcgtgcatccaagcctgatgttggctcatccatgaatatgactgaaggattggacacaagctccactgcaatagtgagacgtttcctttgctctgtagatagcccacttacccctggtagtcctactaaagcatctctaatatcatccaactcaattgtttgaataacttcatcaacaaattcctatgatggcaaaaaaatatgtatgtgttaggtcatagttccatctcaattatgcaatttacactgtaataatatttttgtattgatttacacatgtatatttcatttttttataatttgtttcaacaatgaaataactcactcttcttgtttttgaatcgacttctgttggtagccgcaaccaagctgaatatgcaacagactcctccactgtgatttgtggggaatggacatcggtttgttcacagtagcctgatatccttgcaaaagtttgttgaattttaggataacctcctactcgtatatctccttcaataacaccaccagttttccttccagcaagaacatcaagtagagttgtttttcctgctccagtaactcccatgagtgctgagagaacccctggttggaaagctcctgtgatgttgtgcaatagttgtagctttcgctccttgtaaccttgctccctcatttcctaaaaattgagaatacactcaacattgatttcagcctattatacttctaaatatatgggaataaccatgaagcacatgctaatagaacaagtgaatatattgctctctttgactactgaaattcataacagtcaacaactaagcatgattttcttccactagtaattgtcttgactattaggagtttagaattaccacgggggtgtctacatagtagttcacatcttgaaatgatattgtaagtggtgagaaaggtaacaccatcgtccctgcacaagatcacattattgatgtatttaatatgagatgcatttagtcatagaatgtatatattgaactaaccagtcttgttaggtgccaaagcatttcctacttgtaacttaggcatcctattgtccatgtccttggacatgtctttgcctcttctatcaaatgtggaaaacttatcacgagatataattgctcgggaagttcctgtagctgaggtccatatggtatcagaataacgcttgagagaatggaactatttaaaaacatcaacatgaacatatgctttgataaatatggatagtgaagtgctcgggatgtattatttaatggtatttcacatatcatacttacgtttcttaatggtcaagccaatggcataacctacattaagcaacaaaataaacccaatcaatgcactggcggaaatccaataaaagtagctagagaagtctagtcctcgatccattagtaccctccttccaagtgttacaccagacgttgtggtctaataacatagaaaaaatagtcttttaatgttggaatctaagtagaaggtactcaccttatctaaaagataggctaaggatgcaacaacacgtacctttagccatcgtggtgccaaaaactcatttccagtcaaccctatctcagcatatgacaatggagagatccaaaatccccattttagccaattaggcatagatactgtaaaatatgacacacatggttttaattagcaatgattgtttaatacataaccatgtacacaagaattagtagaaattctgaacgatgtcttgttagcatagtagggcttatggaaaagagacagcggcttacgccgaggaatgataaagcccccaaatagaaggatgactagaaatgacatggtaccaccaactgaactagccaccattgtttgacagtatgaggcgacacatcgaaacaacgataatgctccagtgtggacgaggaatagaatgaggagctggcaaaaaaacctaacacagaaattgagtatgttaacacacaacatagtcattgcatcttaaagatgaggtaatacgaataaacactaaaatagagtctagatagttttatataaagaaatcctgtagtcttattttggtagccaacatcattgaaacccaaatagtaaaaataaatacacctatgcatatcttgaatagactggaaaaatgtttgccctatatatggtggccctcgtaggtatgaaaggttcacacataagaacaaccggaaagagttgataatatatacagtcaaatgcgtacttcatgtgtacaatacttttacaatagagtgtaatttaacctggatgcttctggagtatagccaatgaggtagtaagatattgatgtccaagttattgactcaactaaagaaagtggaatctttagtataaaagaaggtattgcataagcccacgccggatagaaatagtagtctctttgtttgtaaaagacgggaagtctgctaactgcaatagccaactcagggaaaccattaactaaaagaagaatgagcgcatagaagagggaacccatataatagtcagcatgggccctatcgacccccatatgtgtccgtagaaacactgtcccagtaataacagcaagtaatccaagctgaaaaaaatgtaatatgttaatttgttgagaaaatgcaaaaactaaagttttggctcatccgaattctaaacaactatattatatactactatgtcccataaaaggaccaatcctagctacgaacctagacacaaggttcatagctaggatttgatttttttatggaacggaggagggtattatgcaagatacactcttctaacaaaaacctcaattccttgaaaaaaataataatgccaaagttaatataattcatgtgtcaattgaaatataggaagcattttaaagatatcaaatttcaactggaaaccttgatatattacaacctccattgtttttggtgttgatatagtactatatgtagcctaaattgtacatagtaaacatgagaaaacttagctacgtgacaatgagtgtaacatcataaatcaggtgtcaaaaaccggatgttttgtatcatagaatgcattcatctattctcaaaactatgaacatttgaactgaaattttctccaaaagagatatttctacttccttacctgaacaacttttgttatgtagatgaaggcatttcttctcatgagaagaatttcccttgcaaaacatgccttgaggagatcccacttggttagagagtagatatttaaggacaaagcattattgtatacttctgatttatcaaagggattcgcaagctcttcaacaagattttgaccaacttgagatgctttaaatttctcacagaagtgatcaatagtaacaaagttgtatgtttcctcagtacgactccagtattgttgttggtctttcttagataaaacctatacgcaagtttagaagagaaataataataagaaagtcaaagacacatcatactaaccaatacttaactgcttaatattaaaaagttgtatcttgaacttgtaccaacattgtaagtacattatacaaaatgcagagactaagtaaaagagcatgtctctataaaacaatggctatttggaatactatagaacctaaaatgtccaatttagtttatccatattgcatcgaacgaaatccctaagtaggacaattgacatggtagattctattagaattatgaaagctcaaatatgcacttcttatcatgcctgactaatttagataaaatgcatggctcaagtgtcttgtatttctccttttctttctccaatatcttatcaaataaaccattaactcatgttgtttcaagttgggagctatacacaccaactcaaatacacacacttaaacttcaagtcattaatttccaacaagtacttgatgctgatagtgttcattttaaacaatctcacttcgctgtttagtcaagactttttgaactaataatacttttctcatgtacctcctgtagaaaatcagctgctccttttctttccgggcacttgaacccgcatgattcaaaaaaattcataatgcaactcttagacccatggtatacaatttttccttcagccatcaagataatatcatcaaaaagatcataagtctctggtgctggttgaaggagagagaccagtatggtagactctgagatatgagccacttgttggaggcaagaaacaatttggaaggtggtagagctgtccaacccagttgatatttcatccatgaatagtgctcttgaaggtccaactatcatctcccctggttccaagatgatgtttcgatataaataaaaggaaaaccaagcatcttgcattgaattaacaacttgacttgtcccaaaaaaattgagtttgtatggcataaatgaagataaccctattccttttgttttttgtttggaaaaaacttgctagcctgatacctttagttaggtggctagcatacatgtttttgtgaatagaaagtatacattacctatatttgtttttttattggaacactacctgtatttgttggttagctagagtgtagttctatagtattatgtttagcattggaatttacaagggtgtagatcctcccatacataattgcggaattttagttgttgaattgagtgttttaatttaattacaactatatttcaattgagatgatacaaacgccatcctggtattggtatatatacacggttaaatcacctgtggttagtctcttcttttcaccacctgaaatacctcttctcattatatctccgactattatgtcagcgcaaatgtcaagtcccataatctattaagcaagagatagattatacataaggttaaaaagttatgtactaagatccctgagcattgatcattggactgagcattcttcattggaccagttaccttcataatgtaatctgtctgcatgctcctttctaagccttccacagatattgcctacaaaaatacaaaaatacctaattgaattgtaatggtagagcttatgccatttagattacaaatggctaaacaccaaactattttttccaacaccaaactgaatgaggaaaatgagacaagttttcactgttgtttagatacactatccaaataccaatgtgttgcaatgaaatttaaaaagtatgttataagttttaaatttgaaatgtcttatataattcctaatcaaatatcagttcataacatattaagctacacacacaaatatgtatttgtcctcaaaaggtcccttcaactcgagaggtggtgggagtggcagagtcaccaccatcactattggcttcttttacacaactagctaggtggcccgcgcaattgcgcggctagcacccaaacaaaatcatatctttaacggtcatagtgctttcaggcgatatagcaaaacagccataaagactgttcattgtcattttatgaatgaattctaaggcttttatgtttcagttcgccaggttgtctcttgcctgctcatggattcagcaggcagttcaaaaggttgacctatttgggaatctccggatctatgcttattttcaactccccgaagcatttcgtcgcttgctacgcccttcctcgtaacccttttgcttttccagcaatatgtacatatctaagtaattgtcgttctgtcataccatcatgaaaacgaaatttccgtttttcttctagacgactgtatcagcacctagttcattactcttgatggagggggaggatctaccttcttagatttctttttctatttatttttccatctaggattagaaccgtatacttggtagattatttttccatctaggattagaaccgtatacttggtagatagtaggaacggcacattatggcaaaaaaaaaagtttgattcagagagagaggaagcggcagaaattagaacagaaatatcatttgattcgtcgatcttcaaaaaaaaagataagaagcaaagtttaccctttgagtttgagtgaaaaaacgaaaatgcggcctgactattctagaggattgtgcgatattattgcggaatactgagcagaggctggaacaacccatagaagtgtaggggctgcttttacttccgcacttagctactctaggttggggagtagggcccgggggagaagttctagatacttttccatactttgtatctggagtacttcatctaatttcctccgcagtcactaatctaaagaaaaacaaaaaaagaattccattgaattgtatttttattgatcaattagaactgccttctagaacgtataattgtctcaaaagggaaatgggaaaggaattattcctttagaaccatggaactcccgagcggttgtggttgtacctgtacttgcagaaatccgtgtcccgcccagcaagaaaacggctgcgcattattttactaacgcgcgacggagcaagaaaacgtatgcgcgtgtacggaagcgcaacggctttcgcgctcatcccttgcttcaaaactacaggttttagcccagagtttgctggtcgccaaagacgagagcttcgcctttggaagcgccagtagcgtgcttgataaaaaggatctagtgtctatgccaggttggtaaaccatatagatctttcccaaacaaggagtaggggctagcttgtaagccacgacttagtactacaaggattcgggcgttggagggaccgttttgtcttttgtgccgaagctatttataaatcacaggccgaaaccggtgaactttgactcgtcattcaacactgcatgtagactgaattcttcaccatatacaaatggagaagagacaatagggttacttatctcttatttatgtagatttacaccacattccgtgtagatttacctttggtatctatgtgcgtagcggcacaaaatcgacgaagattaccatattgatattcgggcgcatgataaacatcggtactccagtgcatttccccatctgattcggaataaatatgtttttgtaccttttctttaaaatgcaaagtgggcgttccagcacgaatctccgagttctctctcctccgactttcctagagcctccggtagcacagccgagacagcgacgggttctccacccatacggggatggagcgacagaagcatgcttcgtttgctttttcctctccatggactaagataagactagttgttggtcgtaaatctgggaatagtccagactgagaatatgcatcatctcgttagagaaggaaactcactctagtaagatcaggcaaggcagcatatgatccaaacattcactcgctctaagcacgggaatagaataaaggtatgggtcccccaccttaccatccgttctgtcagaccaattgctaaagagttttattcgatttgagagtttttactactcaaagaacttccctatgcaatggtgctttctagttcttatctgcacctacatttaggattaaccctattcttgataatgggaatcatgaacatttcagtatgattttacttaagatttattaaatagctatccccgtatttctaattatatagtttttaaaagtcacaccagctgctaccccttacttctgtcatatccttctttattttcttgctcggtctaccactatttctattcattctccttgaaacctttaaaatttggatcttatatagttttttgagtttattatctcgttgggtttcgtttttataatttctagaagtcccgtcaaacgaattatactcctctacggcccgtccgctgtcttttctctttattatcattgggattttataaatcgaacataattatcattccggttcattttttactttctataagtctcgccaaaccttcagcaattttgccattgtactcctttatggctcgtccgctgcctcccttctttattgtcattgagattttaaaatcgaacatgattagcattgttttttttactttttagtagttccgaatatttaaaaattggaccttgtagtttttattgggtttcattttttataatttttagaagccccgtcaaacgatgccactatacttctctacggcccatccgccgcctattatttattgtcattgggattctaaaaatcgaacataactatcattagaattcattttttattttctagaagtcccaccaaccatcggcggctctgcaactgtactcctatacacgctgcacgctacttctcctttttgctgtcattaagattttaaaaatcgaatatgattatcaatgggttttttttactttctacaagtcccggcaactgccttacccgtttgcttcacggcctgcctgtcgtcccttcttttaatcatcattaggattcaatttggtgctttactaacagtttttatatgtcgtatcaaccgccaccactctattcttttataggcctgttacttaatttatctcgtcatgtgttttagatggtcatttttttttcaatagtctttattttttatcatcaatttttgttatttataaattgtattcctaattgaaatcttttttattttttaatttcagaatttatttttttcaaattttaattaataccgtatagtgttctttttaatatttttattttttgaagtccagttgtttcaaaattgtattcctacttgaaacctcttttcatttttctaattttggatattattttattatgaattttaattaatgtcgtattggcttcttatatggactttcaatattgcttatttttaattatgaatttcagttgattttaaattgtattcctacttgaactcttcttttctttttgctaatttcagattttatttttatttttattccgaatattaactaatctcgtattggattcttatatggatacttcttttaatattgcttatttttaattccgaatttcagctatttttgaattgtatttctacttggactctccttttctttttctccgattaatgtgagaatttctagcccccacagcgaacgtggtgcctcttttcaaagctgtcttaataatataattagcatggtggcccgcgaagattacgcggctagcatcgttatattttctcttatataatagcatatatgttttatcattttattattcaaatatattaaaatgacaacataattttaaattttgcaataactttacaaaactactaatgtgtaatatttatattttattttatatacgtgttagttattaattatttttaatatcaaattttagttatttgtaaattatatatattcctgtatggactctagactcgtcttttaatatttcttttctttaattccgaattttctgtaaattttatttctatatagactctatgctcttctttcaatattatttattattatttctaaattttcattatttctaattgtatttctatgtggactctaaactcatatttcaatattctttaatttttaatttcgaatttcagttacttctaaattgtattcctatattgactttaaactcttcttcccatgtttttcttaatttcgaattttagttatttgtaaattatttttttatacggactctaaactctacttttaattttattatgtttattccaaattttagttagttttaaattcctatatggactctatactctacttctaatattccttatttttaattccgaatttctattatttcctaattttatttctatatggactctatactccacttctaatatttcttatttttaattccgaatttcagttatttcctaattgtatttctatatggctctatactttacttctaatattccttatttttaattccgaatttcagttatttactaattgtatttctatatggactctgtactctacttctagtattccttatttttaattccgaatttcagttattttctaattgtatttctatatggactctatactctacttctaatattccttatttttaattccgaattttagttatttcctaattgtatttctatatggactctagtctcctcttctaatattccttattttttaattctgaattttagttatttcctaattgtatttctatatggactctagtctcctcttctaatattccttattttttaattccgaatttgaactatttctaaattgtatttctatatggactctagtctcctcttctaatattccttattttttaattccgaaattcagctatttctaaattgtatttctatatggactctgctttttctttttctccgattaatgtgagaatttctaggccatgagagcgaacgtggaggtttctttttctattcctttaataatataatagatagatagagatgacaaaagaaagcattcctataacagagacaaggggaaagaaaaaaaaaagaatacataaatgggtggttaatgtttaccttcatatatgtatctatgtcagggtcaggggtaatcccggcctccttctccctcctaatgacttccttcatgatctctagtttgcacaagaaaaataacgacacttggttaagttgagtaagtaaacaaacatgagacagataattaaatgtgctatatatacctgctctagtgccaacgccctgaaaccttgcagagaagtcaagtgtctctctgacagtcatctcagggacatgaagatcatactgagaaatataagctgatgtcttctctggaacaaaggtattcagattggcaccattatactcaacttcaccggtcacctgcaatgcaaaatgcattatgcaatgcgatgatatgataatacagtgagtagccgattattgatgatcaaaatatgtcgctgcagctagtaggctggttacttgtgattagatacttaattggtggaaggatcacatgcaattggctgggaatgaagaagtaaataaccttgagatttttgtcgagctttcctgcaagggcgagcaagagggtggttttgccgcagccgggaggtccaaggaggagggtcagcctgcacacaacacatacatctcgatggatgatcgatcacctcgcgatgaccatgcatgagaggctaatatcaatagtacctggaaggcttgaggattccggtgacgtcgttgagaatggggatcctcgcgtgcggccggcggctcaacccccgcgcggtggcgagcacggtgttgaggagcgtgggcagcggcttgccggaaaccacctggcagtccgcctccacgcgcacgttgcgccaccgcacctccaccgtcggctgccggacgcccaccctctccatcctccgccgctgcttgcggagcagcctcaggttgtcgcgctggatgtcggccaccagcctctccaccagcacccgccgctgcgccgcccccagccgccgcacgtccaccgcctccgacgacagcaccgacgtgcgcatcctgtccaaggtgggcagcctctcgatggccgcccatctcagctcagcttcctcttcgtcgtcgtccccacgatgatcccaccgcaacgacgacgacaaggacgacaggctcctgcaggttgccgcagctcgcaacgatgaaggcactactggtgcttcttcttctgcttctgcttcttctcgttgctgctgctgctgctgcttcttgtcctccatctcaaccacctctaattggctcatcttaatttctggatgctgctgccgctaaacgttgaggagaaatttcagttgtactgaattatttatactgatgattgttgttgacagccagcatcgatcgacgtcatccaaccatacataaaaaaacgagcaattctactatgtttgaggatgtaccatgagataccaaaaatttagtgtaaaaatttagtgtaaaaatttggtaccttatgataactcatactctctctgtttcaaaatgtttgacactgttgacttcttagtacgtgtttgaccattcgtcttattcaaaaaatttaagtaattatttattcttttcatatcatttgattcattgttaaatatactttcacgtacacatataattttacatatttcataattttttttaataagacgaacggtcaaacatgtgttaaaaagtcaacggtgtcaaacattttgaaacggagggagtagtacctagataccaagagataccaaattaatttacaatagaaaaagtgctatctcatgataccgcctcgaggaccgtaaaaaagctctaaaaaaaacatgtgttgcttgctccagagcaacttccattttttttccttctttgttgacaaaacgacaattaattgataacatatactatatatcattattatgggcatatacatattgcgtggacaaaatacaaacaactcgatcgatcgatttgtacatgatggggctacaggtcaaattaacaagttgtgtcgtcgtcatgacacttgcatcgatcttcatctggatgtgttgttcctggatttttctaatcgatgctattgctaagctaagcaatgacgccatccgcacatgcatgactcctactacgaagtatttccgtatatatatacagtatatttcaggaccggctagatgcatgcatgatctaagactagatccatccggtcatatatctcaaattagcacatgcatgcacgccttgcattgttcgttcctgaaaattaaatcaaacttatgagatcagtggactattcaaattaaactagagtacttattactagtatataaaacatggggattgctagttggcgcacgcgccagctgctcccgggcctcccggcccatcagccattttttcttttttttcgcgatttgttttttcttttttcttttgcgtttttttcggtatttttcattttttttcttattactttttttaatctttagcacacttatttttttcaaaatattttgagttgaaagttttcgaatctgagtggaaagtttttgaatcttgagtcgaaagttttcgaattcgagtcgaaagtttttgaatctcgagtcgaaagttttcgaattcgagttgaaagttttcgaatccgagtcaaaagttttcgaatttgagtcaaaagttttcgaatctgagtcgaaagtttttgaatcagagtcgaaagttttcatattttttcaaatcttaacttaaaaaattttcaaatctgtacttgaaagttttcaaatcttgagatgaaagttttcaaatctgggttgaaagttttcaaaatttatcttacacatttaaatttcgagttaaaaattttcaaattgagttttgaaagtttttaaaatttgcttcaaaagttttcaatcggttagtaaaaaaatcttccggacaaaagaaaatcatatcttaattaccgtcattatctactaatcacttagttaattaagctaaactatcggaaactctcgccgccaacgcgcacgcgcgcgttcgcttttccgataaaacatacacatatatacatggatgccattttccaagttgaagtcaagcattgtatgtacaagcaagcttatgatagagtgctcgcctgctcggacaaagctctttggaaatttaaactcttaaattctctgtatcctgctttgaaaatgagtgatctatgcctgtgtttttagttcccttcaaacttccaaaaatttcatcacatcaaatatttggacacatgcatggagcattaaatatggacggaaaaaaaaccaattgcacagtttgcatgtaaattgtgatacgaattttttgagcctaattatgccatgatttgacaatgtggtgctacagtaaacatttgctaataacagattaattaggcttaatagattcgtctcgcagtttacatgcggaatctgtaatttattttgttattagtctatgtttaatattttaaatatatatccgtatactttaaaatttttacacctaatcaactaaacacggcctatgttcttcttaatttgcctcacaaatttaggtgggataattaagttcggtatgaaccttttctcctcctccttgtaacacttcattcacatcaatcaatgtacagtatataaaacacatcattgtaatttctaatcatactaatatatatacatgcatatattattgacgcccgaggtaaacctacagcaaagcagatctccacggaggagttggtcaaccgaatgtcttctcgctgctgtagcacaagtagaggaagccatcgccctcatctttgtatgactcatacacactgcccatcagctgagctgcagccacaacaaaattgtatgtctgaagcttcaacagaggttcaagcgggacaaaaaaaaaacactacttcatatgcaaaactcaccagtctggggcaaagtgttgttgacaaacacaaacaacgctgttcctggaggcaaatgtagcctggaatgaagtatgaaaataaagtgcccaactggcatgttacatggaaccaggtacctgcaattaccactgcttttcaggcttccaaattcaaccagcttctgagaacaggagactggctacttacttgcgcttctccatttctggaagattactcctcgaaaatttatcaacagaatgacctgacaacatggatactactagcatgttagcataaaattcaagcaacacataaacaaactaaatatgggttaattggatcaatgtcattaaaaatatgttggtttcaaaatagtatttggaaccgtgccattgaaattttacacatatttgagatatgccactacttaccccttatagccactacttaccccttggattcatttaaaaaaaaatgaaccaacctgtggcttttccccttcttccttctttccctttttccttcctcctctcttccatggcgtgagagacaggcgatagtttagcaacggcagcggcaagcgtgaccaacgatggacaaggccaccgcacccgccatctccttcctctccggtgctccttaagccaggatgtccgtgtctccctgcacctcgtgccgccactggcgtcctcctacgcagagctccacacaaacgacaacgttgccatggggccctcagtccccatcgccgatggcatcttcctccaactactccgacaatgtggctcctccctcccctagtccctctctgcggctagcaaggtggaaacggggaagatggaggccgatgcttgatggagatggtgatgatggtatcctagatccgtccgcctctcctcgcagcaaggagccctgggcgatggccacgacaatgccgaagcagcaaaggaccaaggaaagagcggtgaagagtggccacttctcctctctgacgagctcctgcacctccctcaccacgctcgcagctgcccgatgcgccatcattgccttctctggtccagcaactgcctcttgatccacctcgtcaccgatggccacctcgatgcccgagcccgacgcagtgaggacggccttcgtgaagagcaccggtggacctgcacggtgttgtccagtgccgcgagctccggcggcggatgcagacgggtcgacccaatcagagagcagtagagaagcatcgccaacaacaggagcagaggagcatgagcagagaaagaggagaggacaaggggagagagaggtagaagatgagggtatttttgtttaatacatgcaaaaatacgtatcttagtggcatcactgagattacaaaccagcatcaatggcatcggtacaaatacataaatagtaatgatatatttccaaaccgacaatttttaatgttacgaatctaattaacccgaataaatatggccttcaattaatggccgaacgaaaagtagtcgactagtcggtgatttagtctcacgtctcatcagtttcagtgtatttccgtggaattcaatgatccataaggtccatctagtacttaacaaaccaattcagaacagagttgactgaagctaactttgctgaaaagaaaaaaaggccggcagtgaaacttaaactatttatatataggatataggaataccgcaagaatggtgttccatatatacgatttgaccctgaatcctaattcactgcaacataaaacagctaagaaatataatggccaaggtcaacaactcgcaaataatagaagccacctacctaccctttttcattttgtacaatggtatcaaaatagaaagtgtgtgatcacagccttgttgatagatgaataaaaatagaatatgtaatgaagcagcacatccatcctcttattaaaagctagataatattacccaaaaccgtggatcgcattcgcatatacgctctgccatgaaactgccacacgcaaatgtgcacttgtgttggcaagaactactaactgacacaagggagaaccatatacaggcctggtttagttcttaactttttcttcaaactttcaacttttttatcacatcaaaactttcctacacacacaaactttcaacttttccatcacatcattccaatttcaatcaaattttcaattttgacgcgaactaaacacaccctgtatgtctgattttttgagcaatcatcatcagtacggtaagggtaaagctcctatcctgagtttcttgtgccgctcaggagaagcttgaacgaatttgaataacatcttgaacaatcacatgattatatgatacgctattgtggcacaatgatgagtctcatactccaatgatatgtttatagaagtgcatgtgaagaagaaaacatacaacaaaagaataacatgccgccatagcagtcggctggcacggatgaagggaataagcaggtcaggtgtttgtgtgtgtgtgtgtgtgtttttctgtatgtaggggtagcagcaagcacgaggaatttgcagtgaaaattgatagcagtgatgaagcactccttgaagggcttgggcttcatctctatagaggcagggaatgaaggagtttattgccgaggtggttagtactaactccgtcccaaaataagtgcagccgtggaaatccgtgtccaacgtttgaccatccgtcttatttgtaaaatttatgaaaaaattttaaaaaattagtcacacataaagtactattcatattttatcatctaatagtaataaaaatagtaatcataaaaatttttcaaataaaacgaacggtcaaatattagagatgaataatgcaaaactacacttattttgggacggagggagtattggtcaacttcggcaccggaaccttgtgcagttgcttggatattgctggcggatgggtaagctactgttagtctataattatatgccaaatgatagtcttgataagtatctgtatgctgagaacagcaaaatcatgagtttggctcaaaggtttagaatcatcaaaggcatcgcatcgagtatatattgtatctccatgaggattgggaacaagtcgttctacatcgagacatcaagacaagcaacgtgttgttggatgccgaaatgaactgtcgactaggtaattttggccttgcaaggttatatgatcgtggcaccgacccacacaccacacacacgtggtcagcacaatagggtacctagcctccgagctagggcacactggcaggccatcaaaggcatccgacatcttcgccttcggtgtgttcatgctagaggttacttgcggacggaggcctgtctcacaagacacgaacacggcggtaacctcttgttggtggacatggtgctggagcattggcggcaagggacggtcactgacgctgtggacccaccgctgcaaggcgactttgccgtggaagaagcaagcctggtgctgaaactatgcttgctttgtttacatcctctgcccagtgctcgtccgggcatacggcaagtcgtgcagttgctagacggtgccatgccactcccagagctatcacaagctcatctaagctgtaacatgctggctttgatgcaaaatcagatgggcaactcatgctctgttggctgttgcgtcgtcggtagctggtaatatctctgacactcctcgagcgagatgaccacaaggttttagtctcttcgctataggatttgaccatagtgatagattactcggtgaaaaggaaatattgtagattactcttatgcaatttacgatgcaaaagtttaggtaagacttgtgagatgattctaatcactcggatagacgttcattcgtttattacatgttaactaaatgattataaaaaattttaaaaaaatattcaacatatatattgacaacagctgattgtaacaacagacagagtctagtagttatttattgtttgcttgtcaaggtagtgtttatttaaaagagatttatcttcagttcaaagataagaattcgtccaactatgtactgttattaaatgtatctctcggattcgattataaatgcgattgatcactagttctgaacaccatggtgagagcccaagacactagacatagtttctataaaacttcacattatcaaaaaattaatactagacactactctttcaatgcgaacaccatctttccatacttaaatttaatgtatttatttcatataatgtcttgaatgttgcgtagaaaccatatctcatgcaagacctgctttttttctctttcctcatttactcaattgccatatcattttttattttaggtggtagcttatttaatactatggatatcatactagtcattgggttaggaatggagtatatgactttattcattaggttcatgttaaagacgcggaaaatgtttctactggtttgttgctgcgtgtgcgtgcacattttttttttggaccaaatgtgcactacatgcatgcacctcctgttctctttgtgcaaagctcaccaggccagcccctcctgcatgcatgaatcttcgttaacttaaggctgtgttcggatatgggaagttgggaactaaactcctcgcacggagaactgagcagtccattagcgcgtgattaattaagtatttgctaatttgtttaaaaaatggatcaatatgattttttaagcaactttcgtatagaaactctttgtaagaaacgcacattttagtagtttaaaaagcgtgcgcgcgaaaaacaaaagagggattgggaacatgggattgcaaacacagctttatccggtacataattagtttacactattgtatacattgtaattaaatatttaagatatcatataatggtattttgatagaaaaaatattcaacatatatgttactgtgtttcacatatttttcaaatatttatatgactattttattttaacaatgtataacttgatgttccactaatggtcagccgcaatattttaaacatccaatttttttgcactagattagacaccgggcatctagtcacgtcctaaacttacacgtgtgttttcagtaggattttagtggggctaaattttaccgttcgcttctatcattttgaatgaatactaataagtgggtgtacatcgttgtaatcggaaaaacagaatgtgaatatacggtgcttcgtaagcagcattatcaaatagttttcttgactagttaccggtatgcagcgtgagcacgactgtagaaaaatttaatttgttgtattttttatgtttttttatatattatatcaacccttttaagaggtatatacaggagtatatagaagataaagacttagactataatacaagtaatagtagatttatctctaggattctatctctaggactctattttatctctagaatatatcttatctttacattgtatttgactattttctctaactaatatatctatacttctattaacgacattgttgaacatccttgcacatgcaagtatgctttttttttctcgaacgtacaaaaggattgcacgtcaatatattagaagaaaagaatatttgttatacaacacattaaaggggtgttttgatgggactggaactttttagtccatatcacatcggaagtttatacactaatttggagtattaaacatagactatttacaaaactaattacacaaatgagagcaaattcgcgagacaatttttaagcctaattaatctataattagataatgtttactgtagtattacataggctaatcatagattaattaggctcaatagattcgtctcgcgaattagttcagggttatggaataaattttgtcattagtctacgtttaatacttctaattagtgttaaacatccgatgtgacagggactaaaaaggtttagggacaaagtagtacgtaagaaatattgccaaaatttggtaagatttattttggttacaaacatgcccctcgaaccttaactgaacgatggttttttgataaaatttcaatacaaatttttgtaaagtttactgtttcaaacttgaatactcggaaatcgttcgaaatggtattaggaaactgctttcgtcccgcgtggaaaagcacaccgagtggtggccttttggcctcgaaatgctttctgctgattccagttcactgtatttttaactgaactttaggagcttttgaacgactctacgcctacgatctacgagcttactcctaattggcactgcattattgccaagatgctgctagctgacagcctgattcgtaatttaactccaaatggttgagcggatcgacgacgacgctgatggtggagtaaagaaaagaaagggagctgcgatctttttaaacaaatcagtttaattattttagcatcacaagaacagagaccgaaagaggagttcaggctacgtacgcggctacgtgcacccgtgccaatcacttgccgcggcagtccgtgataaggaggagatcgatcgatcgatcgattgatcgataggattagctatcaatcgcgtgatgacagtgacgctgcggatggataaaggggaaggagatagtcggaatctggaagacgtgatgttaaggttcgtggcctcagtatcgctggtccctatgtttttttttggataaaaactcgagcactattggctgggacctcactactatcaaagaggttttcacaggcgtgctaaacctgttttcgctggtagactagttgtccgcatgtaaatgaacgcctgtgaaaatatgcgtataactagtctgcctgcgaaaagagctcctagcattaaaaaaattggcatccattcccccatctaatctagtttccattccccatcaatccaaatcaaattcacaaagcatcacaaattgtttacaatcaaaacaagcacatcacaaattaacattcatcgtcacaaatctagaaggagggaggacagacgccaccgcctccaccattctcgccgtcaccgccagatctgggagggaaggagggcagccgccgccgtccgccccggcccgctgcgccccgccgccgtccgcctgccatgtcgcgagggatgggagcgccgccgccatgtcgcgatggaggggagcgtcgccggccctgccctcctccgaccagatctgggagggaggggggaggggccgggagttgccgccgcccgccgctgggagccgccaccgcctccggctggtgaccggggagaggaggagaggtgaggggaggggagaggtgagggggaagggagggatgcgcgcgggagaggactgaggagtgagggaggaggacttagaaaaaagtcgcccctgggttggctctatttatattccaaatctattttcgtaggcagaccacataattggtccgcgtgcaaaaatgaagggtatttttgcggtatttttgcaggtggatagattttcgtaggcggacagcgagcatcaccctagtttacatttttgtaggtagctatttggctcccagggtcatgtccacctgcgaaaataaatacccaacatcagcgaaaatgctttttctagtagtgcctggggtcattcttttgtttttcctgtcatttttgtactatctaagcgcttaaacagaaatttagatgactgatctgtatgttcttttcacgttatttatacatataaacaaatcgtatagtggcttatatgttcaatgattaacagctaataatcaataatttgactatatatttttttaaggaaaacctcaaaagaggttaggaagttcatgtgttcattaagaaaaagagacttgctcagtttatgaggagcactaggctcaaaaatcttatacccacacggttaatcgagaaaaaccgacaaaaacccatgcagagaacaagtcatcattgcctagctaaacaagtagctccaacttttcataacgaacaacagtcttaaaaacccgaacacacgaggcagggctttttgggcgaacactccgaggaggaaagtatcttctaagatacttacaaagcccgtctgaacaccggaactaaattttcacctaaagaaaagtgaaaagcaaaaaaataacgactttgagaagggaaacgatgcccatagacgttgacatcgtcgacaccagtcctagactaagcaaggtttttggccaaaactcctactacatgcctactacagatcttgacaaccattgccaagataaaagtagttgaaggttattgttacttgtcattgccatccccggtaagtagctccgactccaccataacaagtcagtgcacagccaccgaagaaaccacttgcaccgcaacttcttagcgtccccaaaactagaataattgagggttatcattgtcgagcttgccacactcagctaaataactgactctactctaacacaccaatgcatggttgagccatggaagcctcgtgcaccgcatctccaccaaatgggttagctcgctaccacaagacctttcaaagcattgtcgatgctaacatctactcatcctccaccaagcataatacctcaagccagaccaaacatcaccatggagctccccgtgaccagagtccggaagtagaccgaccattagagaggaggagctccaaggagggtaaaagtggtccaatctatcaaaagaaacttgctagccatcatccaagccgttgtccatgccattgcttaccgtgtcctcattgcttgagccactacttggcctttcgcccaacaagaagcaccagcaatcgtgcgcatccgagtcacccttctacggtgtcttctccaagcgcccctcttatctctccatgcaacctcttcatgttgcctctccagctctctgccagctatgtctatgaccgtgccccacctgccaaccatgtgtccatgccgactccaccctactccagttccactcctccgcagccaccttgtgtcgacgccacctgcaccgccaccttaccacgcctacatagccatacttgtgccactttcgcccccatcgctgccacacctgacgcatagagatggtcaacattgccagatctggtttccttgaccatatttggcctaggaaaactagatccaactatcccctcgcctctggatgcacacaccttagtcgttgccaccacctctagcctacgccaccgccatgtacctaggcggttgaccttctcacgcacgctagatccactccctatcctcaccatgctagtcctagggcaccggggaagggaggaagccctactaccgccattcttgccgttgctcaattttcagtgtccaactccgacgacggtgaggaggaaagggaggactgtgggggaggtggcgtggtgccctaggttgccacccatttagccacttaggagcgatgtaagggaccaagcaacatggagtcctgctgaaattatggttctttttgataatttgattccataaaagggcatatataattgtcagggttatggataccacatacctaatagtagttgactaaatctcggcatgacccaccacataccatgtcctatacggaaataacctgcggatataggaggagttccggataaggaaagacaaccagagttctacgtggaaacgacaaggactactcggattgtatccatattggtttccctagttctacttggacaaggggacacctatgggtataaatacaagctcccctaggaggagagggggaggatcaacacccaacacaatcgacatagaagccacaacatagaagcctacatatgccaagacacgccgccggatatcgacttcagggataagcacggctagtaccctacggtgtctccggatactgtcaggagagacgaaagcgctatctctgatctcgccgggcacggattcgaggtggaaggctaccctgttgttgactacgagtcagatcgtcagaccgccatgtcgacaatagttagataggctaccccaaatattatactggtgtgattatcatgaataagagcaataccggcttcggccaacaggatgtagggttattacttgacaattcgggggcctgaacctgtataaaaatccctgtctccgtctcttttacctcagtctcgcgtatatcctagcaccgacgatccccatactatgcaaataccagaattgcgacatcaaatgtcgacagtggcgcgccaggtagggggattttggtgcttcaggatttcgacgagatgggtttaagagatggactctccgacaacaagctactcgacgacttcggctgtggggagatccaacctgtccaagtacatcttccgactagatcggaaccatcatcgtcatcgacaacttggtctatcgagatcatccaagcctcaagctccgcggcgtaacaaaagatgtcagattgcctgatatcgaacgagtacgcagcaaggtaattggtagattggttttttaaattgatctactaatttcgtagatacatccggcatgtatctataaaggtacgcaatattttatctgcaatttatcgtacctattcagatcatacagtattgtcagatccataatttattatgtttacccagagcatgctttttatacaataatacctgttgtgcgggtgtccccgatgttaaatcgactacgatctaacgctgggggctcgctctgtcttcttctgtataagtcatgcttgtttacggtttacataatacctgatatttacatctgctcgttatatcctaataatactagaagatccatgcagtttttgagtacatactcgatattctctgctatatgtcttgccttctagaaaatatttttcagaaacatttgagcactcgagtaggttgtggtcgagtacaccccactatcgagaacattctcgacaaatgcggagtcgtcgcacccaacttaccaacgaagaccgacgacctatctcatagcaccggccatagctggactactcgagaaaaggttgttaacggataattcctcgtaaacgccgtcggtttgatcacccgacatgattgcgagcggacatccggatatgctataagttaggtatgtgagtcatgctggccacatgatatgcacatgtaataaactaactttagcgcccctataggtgattaaaagactcctacttctggttcccgaaccagtaaaacgtagtgatctctctcgcctcactttaagtggtcgagtcacgactactgtctggtcctcgaccagcgatgtggcgtttctcccactacttccactttaagtggtcgagttacgactactgcctggtcctcgaccagcgatgtagcgattctcccattacccctgcttcaacaaagttgatatcaggtgcacaagattgccaagtgttttacccagagatcccttaccacaaaagacacctagcgttgaaacctatcctactgtccctttacgccgtcttgacaaggcctccgaggaacctgagggaacttcggctggggacgcccagagccaataaggccttgtcggatccttcagagacgaaagaccatgtaagatctggtcgtgtaagagttctcgccgtgcgtattaaccaagccgtgtaatcggaaattgagttttctaacttcacggctgggggctaggatcagtgcttgttcaaccaaggcaggtcaaaggtccaagagccctgtcatccgagaacgattctccgacgataaggctgggagctagggagagtgtataactctacaaactgactgatcggagtcggtaagagagaagacgctcatatacaaaacactggtctgtacattcaattcactagtctgtcatattataacatgtcaccctttgagcattcgctcgagggctatttctatctaatattcttttctgagtattgatttcaagaaaattctattcgacattgtcgaaaacttcatgtctctatggttctacaccaagatcgactaaggcgagtacgacaaatgttgacaaagctccgtcgtagactctacgccttctcaatcgctcgagaacggttgctagatctcgacaaggaatacggaatgaagagatggtgtacccgccgagataaaatttcttgacttcaatccaaattctcgattacggcaagacaggagacttagtcgtatgctctgtaccttcttggttgacatcggagattgacttagaaaaccctttaggtgcccgcacgaggctaacaaaggaagtctaatgttatctctgaattcactaagaacggtcacttgagctcgataacagtcactccatggtcagcggttgagaatatgaattcgtacatttgcattgaagtcgggagctactgtcagggttatggataccacatatctaatagtagttgactaaatctcggcaggacccaccacataccatgtcctacatggaaacaacctacggatataggaggagttccggataaggaaagacaaccagagttctacgtggaaatgacaaggactactcggattgtatccatattggtttccctagttctacttggacaaggggacacctatgggtataaatacaagctcccctaggaggagaggggggaggatcaacacccaacacaatcgacatagaagccacaacaatagaagcctacatacgccaagacacgccgccggatatcgacttcagggataagcacggctagtaccctacggtgtctccggatactgtcaggagagacgaaagcgctatctctgatctcgtcgggcacggattcgaggtggaaggttaccttgttgtcgactacgagtcagatcgtcagactgctatgtcgacaacagttagataggctaccccaaatattgtactggtgtgattatcatgaataagagcaataccggcttcggccaataggatgtagggttattacctgacaattcgagagcccgaacctgtataaaaatccctgtctccgtctcttttacctcattctcgcgtatatcctagcaccgacgatccccatactatgcaaataccagaattgcgacatcaaacgtcgacaataataggattaattggattcgtgccataataaatttcgtggtttagaaatataccatcactattgacctatttacaaccatgccattacgattttacaattattacatatataccactgcatacccttcacaacattttctaatttattaggatcaaattacccttttcttccccttcctccttccccctttctactatcctccaggatccagccgactaactccgacgagcttacgtgccagcaacacgttaatgccgctctctttcgcattgcttcctttcctccactaccaccgcctgtacttccagctcaacctttggttgtcactcgttcttcgtccccagacgcttgctcctacactcgctactgctgtccttcccaccattgctctgcaacctgccgtcaccgccactactcaactccctttgccgtgtccgttgccgtgttgcgtcccacccgtcactctatagctcctcggtctcctccacaagcacaacttcctcccaaacatcgcgtcctactcacacctcctcatgttgctactcgacacgctggacttgctcgacgctgcactcctagtagcgatacgaaccctgattctcctccaacgattgcttcttcgagctcaacgccaccctcttcggctgctattcttaagtccgagcgatgagatgaagataaagacaggagagaaggggtgaggagagtttaggggtggagagattattcatcactcttattattagatgttagccaaaaacaatagaatagaaacgactcggtggattcggatgacaaatgatcagaagtcacttgagagaatgacatttgagaataatcatcaaagtggatgaaaaactcaaagaaaaaagaaacctgcctatacgtcacaaaattcaaacgatgcgatttcggaccttgggatatttgttgttgccggtgcgtgttcgcgttgaactcgaaaagattcctactacgcatgtgtaaaaaaaaaaaggaaagaaaagaagaaaggagatgtgaaaaacggaaaataggatgcgtggcgagacttgcgagagatgggatggttggcgttgaggccccgggcggccaggcctcccccgtttcgtctccggtcttcgttttatccccttccttcgtcttcctctcctccctattcttttcctttcctctcctttcctttctctcctcttccccccccccccccccccccctccgcggcgcggccttctcctccgcggaggccactccacccagtccccctcccccccgcccttcgccgccgccttctccggcgaaccggtggccactcgcgcttcccaacgtaccgtggcggtccggccggtgagttgctccccccccccccgcctcctctcctcctcgcgctaatcatttgcgccacttgttcatgtgatccctcgcgcgcggctgttcttgccatgctgagcgtagcgaacatggaatttgggtttggtttttttttctttcgattatcgcggaattcgtttcggtttgggatcttcgtttctggtggttgttagcttttatctaacacatggccgtgcgcggtgcttcttgcagtcacccatttgagttgggagcacggtggcaatggggattgcggaggtggccctccacagtatgccgggggcattcgccgcccactccccggcatccaatttgcccctcgcggccgacgccgcgaggggcaggaggaggaggagcgccaattcgttgcacagctccagggcgctccaaggtccggtcaggtttccggggctgcgggccgccgtggagtgccagtgccagcgcatcgatgaccttgcgagggtcacggaagggaacggggcgtgggttaaggatgcggtggacaaggcaagccatgctctcggtgatgtgagggtgcctggtcaggctgtaggtggcaatgggagcgtaaacgggagcgccgccaagcctccgccccagcggcggaaggcgtcttctgtggaggatgaagcttgggagctcttgcgggagtccgtggtttactattgtggtagtccggtcgggacgattgctgccaacgacccgaatgatgccaatccgatgaattatgatcaggtgtttattcgggatttcataccatctggcatcgcgtttctattgaagggagagtacgaaattgtgcgcaatttcattttgcacacccttcagcttcaggtacttgcttcgttgcttcctcattgttgcatcgtgttttagatccaggccttgtattgatcgtgacagtgtaaatgaacattccggtaataaaattatttcacatgagccagctttgataatttcaattcatgttgtgaccatctgaatatgttgctctaggtttttttctttagacatataatagcttgatctcttgaggaagtgcgcacgatggtaaggcctgtttcttatgagctgctttggtccacataaaattgttgacagaaagttggctgtgtgcttgctttctcatgtaaaagtcgatgcacaatgatacaattacacatcttaaatgtgttggcttactgagattgccatccttaaagttcttggcaaatatctcttctagttaccgtagcaacaaaatgaatttgtatgccctatccaaggtgtaacaagttctgctgtcattttgttatgtagagctgggagaagacaatggactgccatagtccaggacagggcttaatgcctgctagcttcaaggtgcgaacaattccactcgatggagatgaagatgcaactgaggaggtcttggatcctgattttggggaggcagcaataggccgtgtggcacctgttgattcaggtagagctactaatggagatagctagcacatcctcttttttgctactctgcttctactaactcttaactggatatgtgattgatggtttcaggtctatggtggatcatattacttagggcgtatggaaagtgttcaggagatctgacagttcaggagagaattgatgttcagactggaattaaaatgatattaaagctttgtttagctgatgggtttgacatgttccctacattactggtaactgatggatcatgcatgattgatcgtcgaatgggaattcatgggcatccacttgaaattcaggttttttacgatactcctgtcaattctgtgtcttttgtgaatggattttatcccattcaatcaaaagcatgtgtaccctcaaaagttaaacctatcttttccaatcccctgagttttttcagcgatctccatatgaaagtggctcgctaagataactgaaagctgacttgactcaaaacgcacaaaatggtcattttcatagccacttaacagtcaactcacaaaatgggcatggaaatgatagaagtttaaagtcaggagcatgtagagcaaggaacttaattttaaaactgaagcaagattcatcaattagaaaaatcttgtaacatcataatatctaacttttaacacacagaagatttatatagtttttttttcatttaattttccaattccagtatttccatttcaatgatttgcaaaaactatatggaaacatgtaattttcttgttcagttcctgctgtatcatgtgtcacccacatggcagtgaggtatgagtactaattaatctgggttactgttggcatatcagaaatttcagctaaggtagttatttggatgattaacaaatataaacttttgaaattggacacttcctacaagtttctcacgatcaaaattaaaaacaattgcaattagccatagtaaatttctgttgcaatagagtatattttctatttaagtttcgtaataagatataaggaccaaagtcaatcttgaaaaagtttgaatgcaacaagatgataggaataactgtgatgtcgtcctcaacaatgttagttcataggtgtgcacattgaataatcagcatcaatgatgaagaggatggcctgcttctcctgctgatgctcctaataactttcctctgccttatcctagtttaagtgaactgaatacattcatcaccttaatccaaggcctcacttacattttatattcagacgtaactttacaaggtaagggctataataatatttttcaaaaaaaggggctgacattgagtattcctgtatttttcattacagcttctcttttgtgataaagcaaactcacgtaaatattgttttatgtaggcactgttctattcagctctcctgtgcgcgcgtgaaatgttaaccccagaagatggatcagctgatttaatacgtgctctaaacaataggcttatcgcactgtcctttcatattagagagtactattgggttgacatgcagaagctgaatgagatttatcgatataaaacagaagaatattcctatgatgctgtgaacaagttcaacatatatcctgatcaggtttctccgtggcttgttgagtggatacctcctaaaggaggttacttcattgggaacctgcagccagctcacatggacttccggttcttttctctggggaatttatggtccatagtaagcagcttggcaacaactcatcaatcccatgccattttggatctgattgaatccaaatggtctgatttagtggcagagatgccattgaagatatgctatcctgctctagagaaccaggaatggaagatcattactggaagtgacccaaagaatacgtgagttttcggaataattatctttgcatctatgtacatgttcaagttccaatgagcatcttcttagtaatatctattgattcaggccttggtcatatcataatggaggatcctggccaacattgttatggcaggttcgttattctgtaacaaagttttttttttttgtggttgaaattgctgactttgtttttacctgatgcagacagtttgtagtaacaattgacaattcactatgatttgtttgctcaacatatagttgctgagaaattactttctttgcgtgcagctcacagtagcatctatcaagatgaacagaccagagattgctgcaaaagctgtagaggtagctgagaggcgaattgctatcgacaaatggcctgaatactatgacaccaaacgagcacgcttcattgggaaacagtctcgtctttaccaaacctggtctattgctgggtaccttgtggccaagcaactgctggacaaacctgatgctgctagaattctttcgaacgacgaggattcagaaattcttaatgctttgagcacaaacaggaaaagaggcaagaaagtgttaaagaagacattcattgtatgagttcttgaagcaaaagatccatcacttggttctttaagttagcatttaagttataggaaatatcttcctgtatatatacacgaaaggatatgtttggacggagagatgcctgctgttggatgctgttattgtagatgcatctggcttttgcaagaaagcacttgcctgggcatttctcaattgtatccctttcatcaatttttgtacactagacttgcctcttgtagtttaccatatactccatttgacatgacaaattctgtgccaagcagtatgatcccatactattgacttacagttatatgcttgttttgctgacggtgatggatagtgttttaaattgtcggaatcactatagttgggactgagattccgcccaagttcgatctgggtagctgaatggatactgatgttatgaatttctacacactgattccaaagcctatgggagtatctttgcagtacctaatattgcaatagggttgaggttccaaaatgttttaaaaaaaacaacttactgttaaagtgagagtatattgccaaggatccggcgctggtgaaaatgagagactatacaagagaagatctccgagactccgatgccccacatttgaaccttaacctagttagtattctcaccacttctatttatacgtattttctggataaagcaaaggcgggaataaattctatcattcaaaggagtacctatttttggacaacagaatgaaatcgtaatacttgtctcgttaacagttcaagctttggaaacctttttctttcacattttggcaagaaaaacaatacacaagacattagttatacatggtaatatatgatcaaataaccagagaattttccagaaattccgtttctcatcatagatgaaacacaataacacaattccttttatataaacgcactataaacacatatacttacaacacacacactcatctctacgaacatacatacaaacaacctatctcaatgagcacatgcatccgaaagagtgagccgatatatcttgagattagcgaagtcaccacagatgcctcaatatcgatgggtattctatcctagtataaagttatcctccactaactccttaggcttaacatgcaaagatgacacatcatcatccactaataagataccacatcatctccactaattaacaagatgccacatcatcatccactaacaatcatcacatttaaacatcatgcaaacatgctatatctttatagtttttataatttaagagcttttcaaatacaaacatgttaaattatcacccaacataattcacataatgtttcaatgtatatctttattatgttttatgatatcctatatactcatatagttcatcctcacttagttagtgcttaaatgattaatctatggtacaaattatctttctccttttttcctctaattaaatcatatcacatcaattgtttttagtctttagatgattaatctacggtccaaactatctccctacttttcttcttccataaagtcataccaccttacttttttacgtttgaatcaccattctacacactatttagatttaaattatcatgaaccacattaatctacttaatatgatattatctagctatcttacacattattttttttattattatcatactaaattctcacagcaatgcgcggggtttcacctagtatcttaaattaatgtgagcgctcgtgaaatctaaaacttgaacttagaagaagatgtttttaccataagaaacgtaaccagttgacaccagcacacttctcatgctcaggtagtctggtccagcaccacccatgcatgcaaccatgagttaatagaatgttctaaatcagctatatctacccctgaatatttgctaagctcaagttaaggataccacgagtaaacataatcatggacagtagtaccttctctgcataaaatcggcatcaacttatactcttaagaatgcaatcttttgctccgctatatcttgaaaatgcatgctcacaatcttattgtcgcctacattcttgcacgtcattaattggactaattaattagcatgtgataaattaaagaagcacgttctttctaaaacccccgaatatagtcgtgtctccagcaccgatggaccatgagagtttcccaaaaataacacctcgtttggtaaacgaggccactatataagagagaaggatttgcattgctaaaaagaagttcagtttctaataaagggagatctattgcctcctcttttgccctccaagggggaggaggatcagggagaaagggagggccaaacaatacaaaaagaattactgcaggtttaatttggccgatctctcatgccaatttctcgtcttgtaattaatatctccagcagttcatgtatttgctttgtttaatcgttcgtgctgtgatggttccttcctctttaattttatccattttttttgtatgggaaaatttcttcatctttggagtcttttttttttttttgcaaatttgcagtgtgacatgcatgggctgtttggttttgcaggaaccctagggattataattagcgagttaacggcaaattaagatgccggtgtcacgtggcggcaaggccgcttcgtcgaaggccgaccccttcgactcggactcggactcggacctggtcccgaagaagaagccgggggcgtacacggcgcccagcggcgcggcgaaggcgcggtacaaggacgacttccgcgactcgggcgggctggagcagcagtcggtgcaggagctggagaactacgcggcgtacaaggccgaggagacgaccgacgcgctgggcggctgcctccgcatcgccgagaacatcagggaggacgccgccaacacgctcgtcaccctcaacaagcagggccagcagatcagccgcacccacgagaaggccgtcgaaatcgaccaggacctctccaaggtcaatagcttgattttgaatctttttttcccttctgaaaaaatgatcatgctatgtacttcatccgtttcatattataagtcgtttgatttttttcttaatcaaacttaatttttaaagtttgatcaagtttgttgaaaaatatagtagtatttttaacgcaaaacaaacatattatgaaaatatattcaatgttagatttaatgaaactaatttgatattttagatatgctactatatttttctataagtttagtcaaacttaaaaaaatttgaaaacaaagtcaaacgattataatatgaaacggagtgagaagtataatgcattgccgtcttgattcctgacaaaattcagttagcattgccaatgtcgtgccaaagttgaggatttcatgtgagaatgtatgatggttttgatgatggctttgctcttgtgtatagggcgagtcgcttctggggagccttggagggttcttctccaagccatggaagcccaagaaaacaaggcagatcaagggtccagcccatgtctcgggtacgaactcaaacatatatctgcatcgaaaaattcaattcccagttcgatcatgtgctctcactgttctttggcatataaatggcgatatgatatgtttcagatgattccttcaaaaagaaggcgagccacatcgagcagagggagaagctagggctgagccctagtgggaagtcggctaatcgcagctacgccgagcctaccaccgccatggagaaagttcaggtttaatctcgatctctctgccgccatcgcaaaaaaaataaaaaaaatcagagatttgtctagcatagctagcatccattatcttcaattctttttggttttgcaggtggagaaacaaaagcaggatgatgccctagatgatctcagtggtgtgcttgggcagctcaagggcatggcttgtgacatgggttcagagcttgataggtgagttaactccttaatttattcagaaaaagacagattttttttttaccggtgaaatatatatttttttcaagaacacaaaggcagaagctctgcctcattttattgataaagaaaagatacacatagacttaagaaaagattcacactaaaaacactatcctataagcataaagatcattccccaaagctacactaaacccctgataataacaaagcaaccaaaacacctgtaacacccaacacctaatagttcaagataggataatactcctgttctgctagtggtttcaaatggagtttcactatgttaaccaacatacatttcaggcaaaacaaagcgctggatgatctgcaaggcgatgtggatgaactcaactcgagggtgaaaggagcaaaccaacgtgcacgcaagctaatcgagaagtaggctggaaacatgggacgatcagctttgcctaattgccttgatctgcagtgcattggggaaaatgttaaaagagtcgtcctcgctggcacagcttctgcttatcaattaactgggttttgttttgtattaccgggggcatatatattttttctgtttcttaattttcacgatggctgttttcttgacgatcaaagttgtatactgtatgtacatatatgagaaagagaaattacatattgttgacatcaaaagatgctgtcttactgaagttcttcagtgtatgttctccagcctccaggacaataaaaggcatttctatatcctcaacggaattacctttggaagaaattagagaatactgcaatcttgcataagattttaatagacaagtaatatcctcaagagtgttacttgaacttatgtaaaaaaaaagaaaagagtgttacttgaactaatacgaatactctcaccgctttttcggttttataataactagctgggtggcccgcgcaattgcgtggctagcccccaaactaaatcatatatttttcagtatgattttacttaaaatttattaaatagctatctcgttgtcttaaaactttgaaagaccaaaccttatcatccccgtatttctaattatatagttttcaaaagtcatatcagctgctaccccttacttccgtcatatcctttttatttgcttgctcgatctaccactatttctattcattctctttgaaacctttaaaaattggatcttatagtttttagagtttctcgttgggtttcgtttttataatttctagaagtcccatcaaacgctgtcattatactcctctacgacccgtccactgtcttttctctttattgtcattgggattttaaaaatcgaacataattatcgttcaggttcatttttttactttctagaagtcccaccaaaccgtcagcggctttacaattgtactccttcatggctcgcatgctgcctcccttttttattgtaattgacattttaaaatcaaacatgattttagaagttcggaacctttaaaaattgggccttgtagtttttagagtttattgtcttgttaggttttattttttataatttttagaagtcccgtcaaacgatgctgctatactcctctacggcccatccaccgcctactctttattatcattgggattccaaaatcgaacacaactatcgttcgaattcattttttattttttagaagtcccgccaaccgtcggcggctctgcaactatactactatacaccccgcccgctgcttctcctttttattgtcattgagattttaaaagtcggatatgattatcaatgaggtctattttctttactttctaggtcccggcaaccgcattgtccgtttgctttcacggcctgcctgtcgccccaccttttaatcgttattaggattctaattggtgttttattaacagtttttatatgtcgtatcaactgccactactctactcctttataattacttaatttatctcgtcatgtgttttagatggtctttttttccaatagtctttattttttatcaccatttttagttatttataaattatattcctaacggaaatacttttttctttttctaattttagaatttttttttcaaattttaattaataccgtatagtgttcttttaatatttttattttttatttttgaatttcagttatttcaaaattgtatcctacttgaactctcttttaatttttctaattttggatattattttattttttattttaaattttaattaatctcgtattgggtttcttacatcgattcttctttcaatattgcttatttttaattccgaatttcagttaatttaaaattgtattcttacttgaactcttctttcctttttactaatttcagatttatttttatatttattccgaatattaattaatctcgtattgggttactatatggactgttctctcaatatttcttatttttaatttcgaatttcagttattttaaattatattgctacttagactctccttttcttttctaattttagattttattttatttttattctgaatttgattaatctcgtattgggttcttatatggactcttctttcaatattgcttatttttaatttcgaatttcaagcaatttttaaattgtatttctacttggactcttcttttctttttctccgattaatgtgggaatttctagcccccacagcgaacgtggtgtcttctttcaaagctgttttaataatataatagatagacgacgtcttgactttttcatatccgtttaaccattcatctcattcaaatattttgtgcaaacagttagtttatgttggtgtaggccatattatactccatccgtttttaaatatttaatattgtttactttttagcacgtgtttgaccgttcgtcttattcaaaaacttttgtgaaatatgtaaaactatatgtatacatataaatatatttaacaataaattaaatgataggaaaataattaataattacttaaatttttttaataagacaaacggtcaaacaaattttaaaaagtcaacggcgtcaaatatttagaaacgaagggattatatcagatgattacttgtaaacagacgtctatcactgcttaccggctaaccaatggtgtataaataaacagtttaattcaactgaatgttatccatcaatatcctgaagctcctactcctacctactattaataagatactactacctccatttcagattataagactttctagcattgcccatattcatatagatgttaatgaatctaggcatgtgcgtcaaataagagttggatgaagattaagattttcgtagcacgcttttcaaactgcaaaacggtgtgtttcgtgcgaaaaatatttatatgaaagttgctctaaaatatcatattaacctatttttcaagtttgtaataattaaaactcaatcaatcgtatattaatgccacctcgttttgagtaaaaaacttaatcttcatcttcaggaaaaaagaacccaaagtattgtctctgctaaaaatatgagatttaccttttctttatggtttttgagatgcgattttgaccatattttttctgttagattaagttcataaaacctaacaagtttatagattatggaagcctttttcaagacaaatatatttacatcatttttatgttttcaaactaagcattttaaaatacagttaatgtttgaaaagtttgaccggatgttgacctctcggattctgaattttgattggagattcaaaacccttttgtatgggggcgttttggctttcataggacagatgatgcacatgctcgggtcttcttctcagatcgttgctggcagtttcttgagatccatgtcccaaatctccatgacatcgagtatctagcagcagtcgaattaaggctgtgtttagatcaaaatttggatctaaacttcagtcattttccatcacatcaacctgtcatacacacacaacttttcagtcacatcatctctaatttcaaccaaaatccaaactttgcgctgaactaaacacagcctaacccaaatcgaacaaatcacagctgaagtctccagctagaaatagctgctttgcatgatcagatcctgagctagcataattagcgaattagtaaatattgatcagtggtttagttggaccgttgacttgcttgctgtccatgatcaaatcagcatcttgggttgattaaattattaacccatctaaaaaaaaaaacaggtacatagcaggcaccgctcaggcctgagggagccagcaattccactattccaggggccaaaacaagtagaactccagaagagtttgataaaattcataggaggccagaataatgctgaaagcatcttaaattgtttttctgcacagagcactgtctagtcgcaagattaactagatgcatgaactgagtaacataccacagcagcagtaatgaggctttcaccaaaagttacaagaacaaaaatggactgagatttttaaaacaggggcattactgagatgacccaactccaaggcaagcaatttgttgttcccagcattagcaagagctaaagcactagaacagcagcaactgatacagagagtacatgaagaatataagcaactcagagtaagcagtatgcctgttacataacaacttgcacttatatggtccagacagaaaatggacattatgcaattcaaagggtatcaactctagattcttgattgtttttctcaagagctccggaaaataatggcaactattggaattcccagccttaagttttacattaagaaatgttgggacgcatttcatcaactcggattaattccatctgcatcataatttaaaacaaaatgacaaaaagagtgaagcctgatttttagcagtcagaacaagtaatttcctaacagctagccagttttgaacaatttaagggagataaaatatccagatgcctaaaaaaaagtaaactccaggatcatagattggacatagatgtacgcaacacaatgaattggcaaatcgagaggaaaccaaaccggtagcatacctctgaaagtttgggggaaacccaaaagcttgataattcactaaccaggtatgaatgaaccatcactgttaagtaattttgtacaataataatacaccagagacatcagatccataaataaaactaagatgccacactttcctgcttaaaagtcaaaaccatggttttaggacttatgggaatgatgcgtcaggcagaaaaaaaacgtggcacttgagcaaaatcagtaaaaaaaaaaaaacaacaacaccatgctatattttcttgtatatctattaaaaaacaagtacgaattataaaatattatatttccattggtagttactctttggtaatgcaagttccataacaatggaatatgtcttcttttttttcctcactaaaccaactaaattgcaaatgtgagatataaagttctgcgtataacttatttgaatgttatacatttcaaattagccatgcaatatgttttgcttcatatcctcacttaaatgcactatggtttaaagatagatgaagtgatgaactcaagcaaaaaccagtacaaaatcagtatattggtgatgctggttgaactagaaagctagcattgaagtgcaatgcaatacacaaggtgaggctacttccttctgacctgagttcctagcctcctgtcaagttttagaatcatatttttcttcagttagccatactaaaattttacttcatatcttcacttaaatatagcattgaagatgagatagataaactcaagccaccaccacgtacgaaatcagtatatgcttgttgcactagaagctagcatagtagcattgagatgtaacgcagtataaaaggcaagtctatttctgctgatttgagcccctatcacatttaactccatgataaacattagattgcaacctctaactgttacataacaataacaattccatgaacaaaaagaatagaaaaaaagagtggaaaataaaacaacaccatccccaagtcacaaaatgctctgaccttgaagagagccaaagcaagtatgctattgccataccaactctcatcaggacttttcaagaagtggtcgatatcttggccttcacatcaagattctccttgtcatcaataggctttgtggtctgattcctgaccctcttgatcttggggctttcgagccccttgtgagcaaacccatagagccgcagcacctggttatcggcaaaattaaatgctcgctccatactcctgagacaccgctccacaggataatccccatagcttccacatggcttgcacccgacaaaatgagtcacgaatggccaccgctcatccccgagccccggatggtggttctccatcatctcctcgtacttatctactagaccagcccagaagccatgtaagtagtacgaattctctatgaacaccttgttcatccacttctccttttgcgagagcaagaggtaaatcaaagcagactgatcatcagcctcaaatgccgggcgtcccttgaggttggcagtaagtatcttcccggcttcatctcggatgaatcccttgggacccataggcgcccacgcatcaagaagatcaagcgaccactggcaattccggaagaggaagctgccggtgttgagcgcgatccatgagtgcttctcaaagaggagatcctggtatccatggatgatgaggttgcggtcttggtagcgcgagaggggcagctcgaaagccatgtcggtgaagagcgcgtcgctgtccatccaccagatccactcgacctccgggtgggagagcatgaggcggcggagcagaggcagcttggcccagtacccggcgagctcggtgtcgaggtgggcgaggttgtggacgatctcgatgccgtggaggcggcagtagtcgatcttgttcttggtggtcttgagcaggtagtggtcgccgagcgggttgtcgcagggccccggctgcgagcccgtgacgagcaggatcctgggcttgccgccggcgacggtggacgggaacccagggttctgcctgagccagcggcggcgctgaccgtcccagtcggagatcttggggccgagcgcgtagcgttcgacagcggaggcgtaggccgccgccgcctccgtggcgttgagcgcggtggcgttgaaggagccggcgaggtccccggcggcggcggcgtcgtcgtcggcgccgccgtcggagcggatctcgcggaggatgcggtcgatgtcctcgacggccttggcgccggcgagcgcgtcggcgtcggtgggctggttggggagggagaggttgaggccgatggtgccgcggaggacgaggatggtgacgaggccgcagagcacggtgatcttgacgttgttgaaggtgcggtggatcttgcgcgagcggtggtggtggccgtggctgctcagcggcgacgccccacgcggccgcggcgccgtcatcggcagcccgccgccaccgcctcctccccccttgccgttgttgtaccccatcccttcctgccccattccacccccaaccctagccgcctcggatttatcagccgcgcgggagggatcggggcggctcgcgaatcgggggcgcggcgatagagagggggagtgtgagtggctcactcacatcacatgggcgaggcgctggcgcgggcgcggtgaggcggtgagaattgagatgggatcggtgaggtgggttgggatttggaggagaggaggcgacggggagtccccttccggccttccgcggctcaattttttttcttttctcccgttattgttggcttctggggcagagggctgtcggccgttgactcgcgcggctgaatccctccctgggtggcttcggcttcggcggttcggccggcgcggtgtcgcagccagccaggccgcgtttcctgtttcctgggccgtgcggtgcgcacgcgctcgctcgctctccgggtgtgtgtgggtgtcgtctgtttttggacttgactgatgctgaattgccgagaacggagttggtgttttaggtgtgtttagtgagagggctcgggattcggaacggaattaattgcggaacgtgcggtttgccctcccgcgagtggcgagcgctcgtcggtgcctaaaaatcgagcgtttacaggggtgccgttcgctaaggtaacaaatggaaataatactaatccctctgtactaaaaaaaattagtaaaaatgagacacaacccagtaaatatccatattggacataatctaatagcatgaatatagacaaatatgttatgaatctggacagagattagacacaacctaatactatggatctgaataaaaccacagtactatgattctgaacataccaggttatatcttatctaatactacacatgtcccaaaatataaccagctttaaatagatgggatacatcctagtattacgaatatagacaaatgcatgtctagattcatagtactacgatgtgtcgcatccgcttaaagatagttatattttaggacaggggaagtattagaaactgctttggtctgacgtcaaaacttactctaccaaatatttggtaattttcgaataccgtatttcatatgtttggatcacttccaatttttgcgatatcaatacaattgatactattctactctaccaaaaaaatatatagcgcctccaaatttagcattaccaatagattggtaaaaatatataagatgcccagtttttcggaggtgatcataggggtaccggaggtgatggtatgcgtgtgcgtatttatagagacgagtgtatgcgcattgtggaagcctacctttatagagtgtttcttaaaaagaaatggtaagatgttgctatatatatattttgtgttggagggaataacccatttggaggggacctttttaattcgggaaaatattctacctctcatgccatatattcctaaaccaaactcgcaatgtctgaaatccaaactcgtatcatcgtttgcatctactgcagacgttcaaccacgagtaaacgacagtacacctctccttgcggtcttggagctttcttacaatctttcaagtttcaactagcaacagcaacttgttcctctttccgttggatgatcaactacggtgggaattccatcgccgtaggcgcagctgtttacggcagaaattccaatcccattgcatctgcttcaggtcagacaacgttggctgaccacagtccaatttgacgaaagcagcacacgcaggctccgcatgtatctaggcatagaacggaataatttgctaaattcacccgtcatttgtgcacaaacggaaactactccagatatcatataagcatttgctaaacatggcaactaaaaacgtgaattcttcagtagtaaagagcagcgagggaagcatataaactcaacatatcatggtcggtgctgattttgctgaaacaaatcattggtaatgaaaccttctaacaaatctatggttcgacagatagtcatcagtgcaatatcctgcatctgaattgttatagaacaaaatggagtaattcaaaaagcgtgtttaggttgccgtttcccaagttaaccaaaaatgggtataatccaaggaatggtcctagtcaaacaaactgaagcccatgtcctgcacacacaagattaaaaagaaataatcagtcatcaatccgtcagatgctagtaccatgccaaaaacaatatgatacgtatgctggaaagtatactatatggaaacaagtactaccatcataatggaatggcacgatgcagcctagacattgatgggagtaaaattatctatagatgaaaactgatacaagtatgtaccattccaatttcatgacatgatttgatcgcgtatatagaaaacccaaaaggaatactactgcagtgtatagtgcaaataaaatagatgaacaagcaattcgaagaaactcatgctgatcaacaggataccatgaactcaagcatagagcaatgtatcttacatcatcagattcttctttctcctccaccttctcttctttcttagcctcagattgaggagcagctccaccaccagcagccggagcagctgctgcaacagctacgccacctccgccacatggaacagaagcaaacttctcccgaccggaagcaataatctcagtgatatccttaccagccagttgagacaagagtaactccatcttgccatggtcaacttcagctccaactgttaacatcagaaaagaagaaataatcatgattgtacatgcaggcatgcagctacctaactttatcttttatgcacataaactggcatgcctaacatgacaaacacatagtataacctatagaatgtgaaatgcatattagaccactgaaattctccaagaaaaggccctaacatacacacattggataattagtatcagcaaattttctagcattccaaaaaaaaagctattgttacatgatcatgtcagaagagcaaataaatttcagacaatgcatccttcataggacgctactgaaagatataaattgttgaaagaaacgtccaaatggcaaaactacatgaaaatgtaaggccataacaaaagatacaaaatccccatgtagaatggttagaacttagaattcatacttatgattgtatcatatcataggaaacaaaataaaattcgaacaatgccacaaaacacatgaacacttagataatactcatatcaaggcagaacccacttatttttcagacatctcagagcagccagttctatttcactaatatcattgattgcatgcccttactgctgcaaggacaggacagcatgtggttcttacatagaattttctactgcattacagttttatacctgctgcaatatttttttaccctttctgaaatacgtagtttctttagttcgaaaaagggtgttacaaacctcaaaatgttcaacattaacactaaacattatctggaaaacgaagacaacaacctttcataagcaagcaaatcttagcctcttaacatatgacaaggagtaatgaatcccttgacatcacggaagcaccatctaaaaccccaaaccacttttgcaagcaggctaaatattcatgggggcattaccatcatttgaaaataacgatcatgacaacatgtgacaattgaggggattatccagtaaaactacctgactccagaatagttgtaagatcctccgcagatgggttagggttaccagcaagagtggcaaggagataggcagaaatgaacttcattctgagtagatcacaaaaaaaaattaaaaaggggtaaaagagcataactataaaaatgaaaaaacagctacagtacaaactaagcttgtactccctccagtcacaattgatcatcacattaccaaaacgaaaatagtcatatttgattgtcacccaacatctacagtcatcaaatttccttttttttttattgtgtgcatgcgtgcaagaatttaattgcgagattcgttaaatcctgctccatatttatcgcttgcatgcatacatgatttaatgagtgattttcgccagattatttaaatccttccgcaactttggttggtcttgtgccatgcgccatgcgcagcatgcacaggcaactgaacaggcactgcgacactatggctttggcctttgattgatgctgctgctacgggttcacgtcctctactataatggcaccaccattacagaagggacctgcatatcactgactgtaatggtagtgacattatggtagacgatcctcgcctgctgctacatgatttatttttccttggtattgctgcacatacctaataggatgatcaattgtgaatggagggaatggagggagtatcgagaaaacaacaatgcatttaaaatcatttcaaacatttagtgagcatcttcatcaaattcatcaagcgaagacaacatttattggacgtttgtttttctatccagaactattctttccatacaccgtcaccacatctaaacaagcatacgcagaaattaagtttaacctaggcgagcaaaatcctgaagataatagtactattgtttcagcacacagttttggtaccaaattctaacgcctttccaaatcttgcatgttctgtccatggctcgaacggctacaagacatctacactccccagttaccacaaaaattcatggacaagggctcaaggaaaaaaaaatgaaatgggtaacccatagaaccctatttggaaaaacacacgcagatctaatgcaaggcttaaggcctacccccatcaatgctctacgcaagaacaaccgatcccacattcccacctacccctaaacatcgcctccgcctacacgacgctcgcagcttaaaatcggcgagcacgcagcaagcgagaggagaccggcgccagcattgcaacaagaaatcgggaggaggatgggtagaggcccttacttggacgacggcggggggcggtgtggatccgggagccgaagagtgtgcggggagaaggtgacggcggcgaggtcccggctctagtgcttctcgctagggtttccaggagaccaggagggagatgggcgaggaataaatcgtcctccggttcggagggtgccgggttgggccgggcctcgagaaagttgttcgggaggagatacgggccaggcctgaagccagtacgggtatagtttcattcgcgtcctccaactataaagccgggtggagaccatgtgctctaactatcgaaccagtacaaaccagtgtttgaaaccgattgaagataaagagtaaattgactcacgtaaaacgaaaaaaccattatcacataattaattatgttttagttattattacaaatttaacaaatggatatatttgatattttaaagcaacttctatatagaaaatgtaatgcattgtgcatgttcttttctcattaagattaatattttacctcgattttcgttagtttttcaaacgacaaaaggtgcatttgcaagcacttaacagtagaattttccataaactatttttcctagatgcattacatttttccaatggtagatcatatataaaatgtactccatccgtttcacaatataagtcattctagcatttcccatattcatattgatattaatgaatctagatagatagataatgaatctagacatatatatctatctagattcattaacatcaatatgaatatgggaaatgctagaatgactcacattatgaaatggaggaagtaacaacagtaagtacacaaataaccattctgaatagaaaaacaaactgagaatacataatagacatataaatcccattttatgacagcaccttgtttgatatgtatacacattaaaccagggagtataaatattaagagtatgcgatgtcttggaggatgcattatctactaggttggacttcacgcactgattagtggagcaacacgagtgatagggcacacacataggctagtgagtttagctgcaaccattccaggtgcctcttgcatatcaaggtccttggatgccatttcgtcgggcaatttccaatcaaaatggtaaaggaggctagctaggggtagctctatgttggctatcccaaggtttatacctggacaaattctacgaccggaaccaaatggaaggtactcaaaagtattccctttgtagtccatatcactattttcaaacctctctggcatgaactcctcagggtcttcccaatacttagggtccctgcccaatgcccacacattaacaaacacacatgtacctttcaacacatcatagcccataaccttgcatgtctcacggcatctatggggcactaggaggggtccagggcaatgcaatcgtaaggtctccttgatcaccatttttagatagtttagcctaacaatatcatcctcagtgactgtgaccttcccttggagggcttggcgcacctcggcttgtacttttgtcattactcttggccaccgaataagctctgccatgatccagatcatcactgtggctgatgtctcgctaccccctgaaaacatgtcctgtaatagtttttttgtttgttaggtatatgatagtttttcaactcataggtcatagatagttgcacaatgtataacctaatcttttagtgataagtatcatgaaatttaattctactaaagcacaatgtataactaaatttacagaaatttgttgtgactttgaatagattgtttctatatttgtcattttaccaatatgtgcttttcgtttggtttatgtcaaatttttaagtcaaatctaccataccaattttatgtataactaagtactttaaatttaattggtagttaagattttgaaagtttgactagagattatctataacaccatgaccgtaattttttatttcataggttttctgccttctagttatctagatatatccgacaccctagtcgcatatatacacgatggaattatatatagtagatagtatatcaatctttactttaactcagatgcagcgaaatgttgcaccgacatttatgatagccactggatccctctcgtgcttgatctatatcataactgtttattactcatgcacatgtgaacttctatatcaatggttatagaactcaaaatatggacctttcataaactgtaagtacatgattttgaaattgttttctcaagcttttttttaattatgccaaagtttcctgctgcaacgtgcaagatattcacaagtttataagaggctgtttggttgaagggactaaaatttaatccctgtcatatcggatatttggacactaattagaagtattaaacgtagactattgacaaaactcattccataaccccggactaattcgcgagacgaatctattgagcctaattaatccatgattagcctatatgatgctacagtaaacatgtgctaattatggattaattaggcttaaaaaattacctcgcgaattagctctcatttatgcaattagttttgtagttagtctttgtttaatgctctaaattagcgtccaaacatccgatgtaacagtgactaaagtttagtccttggatccaaacaccacctaaattcttatccaacaacaaaaaaagactcatgtagactagaagattatgttatgatccaaacttttgaagtatcacaagaaaataattaatgatatgggcctaatttagtaataaatacataaagtatgttctatttatgtggaacctagtcagcagcatgttcgttcgcacatgatacatatttttaaaaataataactgatatttattaacttgagtttacaaatatcaaacaaatgttattgagactcaaaactgaccacaatataattcgttattacttagtttcaaattttcgaaattgttaaatcaccaaaacagaactaagtgaggtttatgattcatcaaacctagtcaccaactcaatgttatttggctgttcagtttattaattctgcctttcagatttaatcaataaagaaaataacataatcaaaactacagactgagtaccacttaattttcgttaattataaatttcagaattattaaatctaaaaaaagactacgattgtgatttcaaacgatgtgcagcttgatattcattagttctggaattttgtaattattcaaatcatcaaactataattgagattctagactatgtataactattaattaatctaaaattttagaattatgttcagataatatattccactcatcagatttataatattcaatgtttatgaaaatatttggtcaaatttttaacttttaccaaaaaatttccttaaaggggaagttttaataaaatggtacacatagattttctcaaaaaatattatcgtaatatcttagacttaacttcgaatatagaattgatggtcacacttttattataagtgcaatgtatttatgactaaatgggatataactaagagtacgaacttgtacggcttggtatttattaattcatatatagatatatcgatatattctttggtggaaggccttgatcatacatttgatagatggacatgtatgatttttttctttctaggttaacatgataatttatatattttattattatgattgatgctagattttctagcttttttgaggaattttttctagcctttttaccttctaggattgatgtgggcctcaaatctatctatgatatgtatatctatctatctattacaatgatgataaaaaaattacacttgttgttgtggagaggttataaattctcgcattattcaaagaaaaagagaatgataattggcactccaattggataaatctaaattatgcttcatctgtttcatattataaatcattttgactttttttcacttaaacttagttaagattgactaaatttatagaaaaagtaaacaacatataaaataccttattagattcattaaatctagcattgaatatattttgataatatgtttgttttcgactataaatgctattatatttttctataaacttagttaaatttaaaaaattaactaagaagagattctaaatgatttataatatgaactaatataacataaaagaacatataatgtgagggcaatcttacaaacagaagcacgacgatgatttcatttgtgatcgggatcggcgtgccgccttccttctgcagccctagcaggacgctgaggaagcagtctttccctgcagctgcagcagctgcctcgtcgccgccgtcgccgccgctccccatgtacccctcgtgctcccggacgatgtctgctatgatccgctctatcctcttccggctcgcgagacccctccgcggggccgcgcccagcatccgcgcgagcctggacgacgggaagaggtcggcgacggtgagccaggtcagctggttcttggcctcgtggagcgcgcccaggaactcgtcccggtacctgcaccggccgccgacggagcacctcatcacgacgtcgttgacgagcctcccgagcctctcggtgaggtccacggcggcgccgccgccgccggccagctcccgcacgaggcgcgccacctcgtcctcgcggacgcggctgaacgacctcacccgggtggccgtcaggagctcctgcgtgcacagcttgcgcagctgccgccaccgctcgccgtacggggagaagaagatgtcgctggcgtcgaaggagaccgtcgcgacggtgctggtgacgtggcggtcggcgaacctgaggtcctggttcctgaggatctcccgcgcggcctccggcgtcgacgccaccaccgcgggcacctcgcccagccacagctgcatcaggggcccgtgcttctgcgacagagcgcgcagcgccctgtgggtgttcgggttgctggcgagatggtggatgctgccgatcaccggcagcgtccatggccccgggggaaggttcagcctgggcttcttggaaatcgagaccagcttggagaggaggatggcgaggagcatagacaaggccagagatagtagtatcgtcttgtcctccatgtttactggtaggagaggtaactgcttaacttggggagacagctcaattttgtgaaggattgtgtcttgtatttatagtccacgacactagaatctacaggtcaaacaggataaagccataaaggttatgtactaatcaaatctatcaacatcgattacttctatatcaatatataccagattaacatcaattacttcgatatcaataccagagacttaagtaaaaaaatttgcctctcgcatcgtcctcctcacgggccggtggctcgggaggtgacaacaccatcaccacctccctccccctccccccttttctgcctcgccgcagccgcctgagcgggcgccagcaaaaccgtgcggccatagggatggggggcttcttccttctctcactctgcacttggacagctaggggagctgatcggggcagcggcggcggcggcagctagctagatccgcaccgttccagaacgaatctgacggggtggcggtgggcggcagggctaagtggtggtgacggcggcgacgactaaggttggcggcgacagagcccttgcccagatccacgtcgtttccgaccaggtctggcggggtggcggcggcgacgactggtggtggcagcgggagtgcgctgggacgcaaggccggctggagcagtgtcagcaccggcgggccggcgaggcaatgacagcggtgcggcgtcggtgaaatagtcaataggaaaaaaaaccatagaaaaaaacaatttttgtaacagctttctcgcataaaatcatttctggcggcctatttctattggtgtgatgaacagaaaaaaatcatgttggcaccaaatcagaaataaccatcggtcttctcaaaaagaaataaccatcgatgtgctgtgtgcaccatcataaaatttggctttcaagaagaaaaataaccgagttcaaattgagtacaaattaatatttactaattttaaattttattaaatcatcataaaactatgattgagactccaaactagatacaatttcctatttataaactctaattgttttggaattaccaactcatcaaaaactataattgtgacttgtgaggctctaggctgagtagaactcaatattcattaaatcgaaaatttagaattgttaaatcatggaaatactatatttgagagttcacaccaagtataacttaatccattaattttgaacatgataaatctacacattaattttaagacgttctcagctagccatagatttgatagatggattcatataattttacctttttaaattaatgtgagaatttggagtttttgttattaatgtttcatgcaactgtcagtattttcaaatttgatagtgtctaagcctcgtcactggtgaattccggaagaatattatactgtgacattggcgagctaaactaagtccgtattgtcaattttgtcatccctcgtgggtttaccttggggacaaggctgctaacggccatttcagtccctaatggtgttgttgagacaaatattaaaatatcctggtcagacgccaatgtccatttctctatgacaatatttgacttgaaccggttaacaagctggaaagttctttcacaaaaatgtagacctcacttaaaacaaattgttaacctaaagtgacggtcaagtcatgctttcagtgacatctgactcgccggctagccctcgtctctgatgttagaagaagcaagctagctagatgtaaaatataatctggcctaaattaaacgttagtttgatgaccgtaacaaaagctcaatagtcaatagtcaataaacgtggtatgaatatctaatgctaagggcgttgttacgccgcaaaaaaaaattttatgacgacaggaatgattccatacggattcgcgactatttgtctgtactctgtactaggtccaacatgcatctattcctcacgcagaggattcctaatttcctgtttggattttggagctctcagattctacacgatcgaattccaaataaattacttcaagctaaacagaatttatttactacaaagaaagcccgagtgatcgctgagttgtgatcacaccaaagcctaagcttttacttttctttttacgaacaagcgacaacgtaccaatttcattgaatatagcgaaaaaagccaataattgcgagtgaaggaaataaactgaaaaggtagacaatgacctatggcaacaactttattaggcgcttgtctcctgccatcatccaagatcttatgttttcctttattttttcgttatcggcaacatcgtggcaaactccttttgttgaaaagaccctctaatttctcccttccaatttatttttccaagagacttggagaagtagggatcgtgttccttgcttgggacgcctgacgcattgcaaacgtctctcaccactcgtggaccgtggcagttgtcgctcatgatactggttttagcggattgcatgcaacctggagtatgttgttatcatctacattctacacggaggcctaagtgattagcaacaaaaggctttctaggactacgtctttttaagagaatagatgtaatcgtccgttcaaaatatagctagttagctataaatctgggaaaaaacttatcgttattgtgttattaattactctggttttggctattatgtacaccgtcactatatccgtgtccacacgtactaataataatattatgaaatatattaaaactttaatatgcacgtagtttgttggttattttcgagttatattggtttaaattgaaataaaattccatgtgtgtaacaacttaataataattaattttgagtttccaaattaaactaataaaatgctaaatggagagttcacttcatataatatcatataatatttattatgtccgaattttgaattattaaatttgggaaaattaaagctaaagagtccatggtaatgccgtgttttatttatcataaattctcaatacaatctacctaatcaatggtcatctcttcgttggttgacttaagaactttcttggagtgtgaatttttactgtaggcattgattcaacattgttgtattactgaatcaaaatacaacaagagatcttgcttttaatcataataacccagtggaatcttttcccctttttgctagaagaatcatattccaaccaaagacagaagaaattatgtacatcgtctaaagtgtagtacctatatatacaaattaggagtacaacaatttgcagttacaatgttcactactgccactatactatacaatacccccaaccctgcagaatcttttgcaataaactgtcgaacgataccactggtaaaggccaaatttctgtctggtaaaggcatttcccttaaaaaaaagaattgcatatacaggaattttcaaagcaagactccaagagtggaaagtggagactctcttggtccgctggtaaaatgtgcggatgctgtgcgacctacaagctgacaattcatacctccactggacaaactgactgttagtatctccataatgttagtgctatattaacatggaagtgatttgtgaggattttccaggtggagcatttgctcaacaaccatccggagtaagttttgatagcctgtctgctgcaagcctcatggttttggcatttccattctgtttggcagcagaacagagtaaactccaggctgaagcaccagattctgaagggactacactatcaatgaaatgctctgcttccttgaacatgccagcacggcccaaaacctcaatcatgtgggagtaatgctcctctgaaggttgtattttgtaaacctcggtcatggatacaaagaactggaaagcttcatttacaaggccgatttccgcacaggccttcagcaccgataagaatgctagggaatttggtgatttctccttccttaacatctgcacaaacaggcgaatggctgtctctggacaaccattttctacactagccatgattattgaggtccaagaagaagaattcctgcctgaagtatttctgaaggcctcaaatgcatgtgtgaggctaccacaacctgaatacatgtcgataaggtaatcgcacatacagcctgtagaagaaagtccacgcttcataaggtaggcatgtgcttgcaacccttcaggaagatgtgctttctttccacaagaactcaagataagacatgcagttgggtagtcaagcaccccaccagaacgttggattacatgaaaaagattaagtattccaagatgatcaccaagttcagcaaactcttgaaacagcgtaccccaagaaatttcactatttgagagtgacaagcacaagcgaagggcctggttgaactgtccttctcttaagtaaaagctaatcaggcttctcagaacagaatcactggttccataaccatttctgatcgagttgctatggatttccattccacttacaacatccccaagagccatgcatgctgtaagtacagatgtgtatgtaaattcattaggttgtacatgctccaactgcattgtccgaaacaaatggatcgctctttcaaactgaccgttcaaacagctgcctgatattatagcggaccatgcaactgtgcaaggatccttagttctcgagaatagaatatgtgcttcctccaaagaaccgcatttagcatacatgtcaaccaatgaactgatcacaaaaggatccggattcacatcaaactttaatacgcaggcatgtagcatccgtcctgcagccaaatcaagatcagaagcacatgacttcaaactgctggccacaatgaactgatccagctttccctgtaccgataaatagtacttaagcattctcaaaggtaacatagaccggctcttgcgcagagtggcccaattgacatacatatccatgagagcactcatgacatacttatccgagtccaaaccagccctaatgaggtaaccatgaatttccctgccataatcaaaagcacatcttctagtaataacatgcaaaatactgcccagtgtatactcatcgcattctgcgcatttgtacatcagatcccggaaatgaaccaaagcctcctcatcacacaggttgtccgcatagcattggatgacaatattccaagaaaccaagtccttcgcattcatctcatcaaacactttctgcatcagctgcaattccctgcacctaccatagaactcgatcaggcagttctccaagaattcactgggaacgaatcctgacttgatcatgtagcaatgcagctgatatcccaaacggacatggcccaagctggaagctgctcggagtgcaacagagagagtgtacgcatcacatgaaacgccaccatggatcatttccaggaacagcattagcgcctgagtgtcgcagccgttttcagtgtaggcgctgagcattgaagtccaagaaaccgaatccggcgcggcaataccactgaacaccttctcggcgcaacccaacgaccggcagctcgcgtacatcgtgacgaggccgttcgccacgaagaggtcggccccgacgtaccccatcttggctgcggcggcgtggacctgccttccgacgccgaggctcccggcggctgcgcaggcgcgcagcgcgacggagaagacgaacgcgtcgggcctcagcggccactccaccatgcggagcagcaggtccagcgcctcggaggccggcccgtgcgtggcataccctgacatgagcacggtccaggcgacgagcgacctgtcccgcggcagcattgcgtcgaacgcctgacgcgcgggctgcatgcggccggcgcgcgcgtgcgcgcgcatgagcaagagctgcggggcggcatctggtacagtttccgcggatctgtgggggacggcgtgtgccacgcctacgcagacgcgagaagagcgcgagagcgagaagggaggaggaggaggaagcgccattggaggctgctctgcctctgcgacgagagacgaaagattcgaatggagtggccaggaaaaagggtggggataaggtggagatgggcctaactatgggcctctcgggcttacatttgagcccatcaaatgctaggctgtataggaataagttaactttaggtccctcatattgacgacgagtttgaatcacatccctaaacctcaaaaccgggtacaacacatccccaccttttaaaaccggtgtaaatatagtcctaaggcagtattgaaagcagttttggatgacgtggcgatgacgtggcaccacaagaaaaataaaaaatcatgtgggtcccacatgtaagtgaaacaaccatcttctttttatcccctctctcactctgtcaagtggtggcggcgcatcgccatcaccggaacaaggggctggttcaccgcggcggtggagccgcgagggaggatctagagtgtaacaagtggggggccttaggccccacttaattttgcagcgagtgggggcaaatgcccccttggcactttttacttccttagtctacctaagcgatagatctttgatatccactcatgctattttctgcctccgccctacgtggaggacgttgtcggtggctgataggcggaaaacgaatggcgacaataacgacgcatagcataagcgcggaggatgcacactctgtggatactgctcggcttcaatgtcggactgttcagtgtcatcgtcctcgtcatgttgctgctctcttggggcgagctcctcatccacgtcggatccacgtccccatctcgttcagcatcttcaccgccccctaagcatcattgtaagcagagcgaattaatgtgtcttgatcttgctaattagtgactcgatcatcaacaagctgacatgtttttggttggtgttttgcagtggctagtgatccagacgatgagcgtggagttcaggccattctcgttgtcctttttcctgctgctcaacgcggctatctggttcgcgtatggcgcttcccaatgtgctgggtttcgtgttcggcgtggtgttgatggcgtttacatggtgtaccggagcaagaagccaccgtcggcggtggcaatgtcagtacctttgtgctaaaatatagttacttaattacctttcttgtttaaattttaggacagagggaagtaagcaaataatacatcacatcctcatattggaatagggtaatataattttgagaggttttacggtgtttgcacttttttaaggtaaaattccaacgctccacaataaaaggcaccacttaaaaagtatttaaacactggcacaagtacttaggtagtaagggtaaaaagatatttttctattagatagagaagggtataattatctcaagtattagttataggcacataggtaccgcatcggtactggtagttatcatctccggtacgttatttatgtgttattttttcgatttacatttttttcttaagaacagattcacccggtaatcatccattacgttagttacatgttttatagaattcactaattaacaaaattttatatgtcttagggaattaaataacttattttataatgtgatgcatacacctagattttaatattgacccgaaaataaccatctccctgattcacctctcatctgataatatgaaaaccaccccttgattgcatgtccatttaacgggcatatatgtgcatgcatgcagtccacggattgcataccattttagaaggccggcaattgccgcaacatccgcaccacatgctaaatatccagagatatgtttgtctttgcctcctatagtttttctttttatcagagctatagattgcacaaatgctcaaccatgatgaccattcttttatcagagctgtagattgcacaaatgctcaaccatgatgaccattcttttatcagagctgtagattgcacaaatgctcaaccatgatgaccgtgtctccttgcgagtgcacctattcaaaccctcaaagaaaaatgggaaaggagaactcagtcgtcttttatatgaatgaaattatgagctatgtaaatcactaatcaatggcgtaaatgtaatcttagcagattcgtttcgcctttccattgaccggtcgacctcgtctccgcttcaatcctcaaccatgttggcagttttccctctggttttttttctagtgaaccaattcataagtttcaaatctagtaagaacgaagcgatgcgagagaagtgaaagaagatacaaccttttttttcgtgtagatctaatcgatgcctaactagatttacattttctctaacgtacagtaccgatcattggagcaaggtattcaattcggcgataatggcaatatttcactagttaattactccactgccattggttacgataatttttattccataccttaccattctcttgatcaatagtccacattactccacctctcaatatctctaagcaccttgcaaacaccgtaaaatctctatataattttattttgattttctagggagcaaatctccaccaaaagaacttattagacgctcatcgtctgaccgacttgaaacaggtgaaattctatgtagcatacatagaatttaccatttttgttgccgcgagaccgttttgactttctgaatcaatacataggatttctccctaataatatgttattggtttaacaatgttgcatggttgtatcaatagtttcaggttcttgtgaggattaaaacactagtgtcctttcctgtcagaacaaaaaaaacgtgcaacagcaaatctgttaacgaatgaaaaggacgacatagcatttcggaagatgaaacaaacctatagaggatcgagcaacaatcatgtgaggaattcgactgcgtatatttcgaaaccatgcggatcggactggatttattcataattcggatttcaactgctacactggccggcaacagataaccatattgcaacactgctatgatgcagatcacacaagctaagactgcactccccgtttactagaggctaaatgcaaagagagtaaatcaatcgcttggagttcaatttccagatgtcaatgcaagcattatgtgtgatcatcaagcatcagccttggccggagctgcttctggagcagcaggagcaggaggagcagcagcagcagcgatggcaggtgcttctgccgcggtggtggtgggtggagcagcttcagcttcagcttcagcttctgctgttgccggagcaggagcaggagcagctgcagctgcagaatccgaagcggcttctgcagcctcccagaaggaggtcttcttccctgtctttgagaccgtctggaaaacgtcttctggcttgacattgcccttcaccgtcaccttctgctgctccatgtctatgtcaaaggtctccacgcctggttccatgagatatatcgagcataagcaattgtgatcgttggacaatttacactatatggtattctgatttagttcagcaattagatgtctggatttcccggctacggattaatgattgatcagtttcttcacctcaagttgaccattgcggccagctagccgttgctgaccacacgtcagtttcgttgttgttaaacagatttagatcaaacagttttcatatatcactaataaataaataaaggcattcttagtcttggaacagaaaaacagtttcagctcagagaaattagtcaccttccatttttgtgagaactctccttacggctccagcacaaccttggcatgacataccgaccttgaggacaacagtctgcatatcatatgagattgaacatttttattatcttgtattctgacattgccgtttagcagaccaacaagcatcagttttctatctaacaaggggactcatggccaaaattcagcaaaattctctgtatctaacaagaacctaacttcagcaacctcatggcctacagcctacttctttgtatctgaaactcatccagaaaaacaaacaaaaaaaaagaagcaaaacgagaaatttcatccattcctcctactccatcctactgactgcatctatgcaatctgagaaggcgtggaaggagattgttacctcagcggccatggttcacggcagtaggaacaagaagcagcagcagcaaaaagaacaggactcgaattcgggagataacttggggtagcttcatggatcggaggacccttaaatagacaagatgatgcgtagcgaggaagcagaagacggtgaccggtgcccggtgggtggacgtgcaccaaacacgcataaagccccggagaaaagccacccccacccccatcctcctcacaaacggatcgatgtgaggttttctctttctgtagatgccctgatctgggctaaactaaagccatcctgctttggttgaggctgggtagtgtgtagtacaactagtacacgaagtacaacacatctttcttctcccattgtgtagtacagatgtacaatttctgcttgtaatcagtttgcaacaaataagatcacctcccgcttgcccaaaaaagttgcgagattctcaagtttttggagtgcttatcgctttgcccatttgctgctgctgctactgacttttttggtatccgatattctcatattctgatcagacacaccttaccagttatttcaccccatgtcaccaggttttcctctttcatgcttttcctcttttgattaattacagtttttcacctcatgttcgtttcatctgtttgagcttatttgtttatttatttcatcctgttgtggtaacgttgtcagagcatggcaaagcatgggtttttggttgattgattttagtgatgatcacagaaaaatatcctgggttctcgaagtcatatgggttgaaatatacagtcgtctccaagctggagtttggcatcccatgttctcctttttgtcacttgcatcaccagttcatttaattgcatctagcgagttctgttaattgcactgcacattttaaggatatattcacatgctgccaactgcctaagcaggctgagaatcagagcgcgctggattttgtggtgcctaggccaagaggaattgggacccagctggttttaggctagttgatcggccgatttgtctgggagaagcaatcatgcgagagcatttcgccggtgctaacggtatcagcactagcatcgggcttacgtagccgaattgcactcaaataaattaatcttagaaagaattaagatgcgcatgtagccatgatagcatatgccaagttgccaacaagtgagaagtaacttaacggtttaggttcttcgcggcggaacctatttatacggatttagattttaacataaatatttatatttacatctgattattttttaatgtagacgacgtacctatcaacaataatatatgatgtgtttgcggtgacttcgtgaattttatatgctcagttttgaaggtgctcatatgaatagtgaatatttataggggtgagtgggtgcgtatttatataagtatttttacgtatgtatatattttcaaaaaagaaaatgacagtatatgtcggtataattttgctatatatttatcaataaattttcttctgaaaatttgactgatataattacagtacaatcgtaatataattaattacatgtaactacaatattacttatatgtaactttcatataattttaaaccgttatgtttgtttcaagatttatgcatgtgagaaagaaaaaaagtcacaacgcgcacacatgtgagaggattcgttcccacgacttccgtttcaccaaaatagcatgtcacggagagatttttgaaagttgcattatagttacatgcaaattacagggtaattacatcacgattgtactataattacatctatcaaatttttgaaagaaaatttgtcaacaaatatataggtgatccttatcggtatataaaatttttgagctactgtctttgggcccatgtatacccttttgtctaactgagattacctttgttatcgagattttgcatgttgcaataagttcatattaagtcccttaatttgtttaccgagtctaaaactcgtgcctgaaccgaaataccagctatatcctatctccaactcacagtaccgtgtcaactttggtctctcagtagtatagtgactggtttttggctgacgtgatgagtagtatccacgtgagcctcacaatcgactgccaattctcaagcgttggagcagggtggctagcaaggggaggggggggggtggggggaggggatgcggcggtccgcagcagctagaggagactcgacaagaggggatctggtgatggttgggtctagcagtgaatgaaggcaacgatgcgtcgacgatgaccatgagcccatcgagctcgaggttgacagcactggcacgcgtggggatgggaatggagggggcgtgggtagggatacaagtgagccaacccgcgaacccgcttatatgtaaaattagtgagtaacccgcgggttacctactaatttggcctataaatgagtttatgggttgtttcatttgcacctctatgacgcggcaagcagagtcataacgcgaaaacctgtggattactttttatttaacatataagtaggtttgccggtcggtccgcttgcatcccaaggcgtggggcaaagcatgcgtgcctcgatctgcaccgccggagccgtctcgggctcgatctgctcaactagcttcgttttgcctcgatccttcttgcttgcatcacctaggcctagttctatcgcccccgtcgctagtccttggtccactttgttggctatagcaaattagcaatgattgatgtgatctgttggagctaacttcagcacgttgtgactgttttttcagattttcttttgatttttcagtctcaactatcgatgtgtttatctgaatattgatgaatgaaaacagcgcactggtggaaaaaccatctttggtcggtccaccaaattccataataatctcggttccattaaaaattgggactaaaaacgatttttagtcccggttaaaaaaattttgatctttagtaccaattggtaacaccaaccgggactaaagatcatttttagttccggttcaaaaagttgtcgggtcgaatttagaccctaattatctttagtcccggttggtataaaccacccgcgcgcgccagagtctcgatcttatcgatccattccccttcctctctctctttactccctatgctctcataaacagcaagtcctcagatcggatctggcattttggctggcaagtcttctcctctccccttcctccccttccccttcccctctcctccccctccccacctcctcctcctcctcctcctcctcctctaccagagtaagtccagggggccgagcccgggcggcggcggctggcggctggccgcgggcggcagggagcgtagcagtggcggccggcggtgccctctcctctgccggaggagggaggcggcaacgaaagcacaattttcttttttttttctgaatttgtgatacatttggatctaagaacttgtgatgtttggatctgtgatgtatatgatgtgtgatctatttgatgtttgatctgtgatgtatttctttaagaatttgatttgtatttttttgagaatttgtgatgtgaatgattcattgacttgggatgatactttgattttgggatatttggggagatttgggaaggagcaactctttggaaagaaacaatgagaatataagaaaagaaaaaaatggtgaccaaccgggactgtgctactatctaacaccaaccgagactaaagatgtatttttagtctcggttatttcaaccgagactaaagatagtgatctttagtcccggattcatagtcccggtggaaaaccgggactacaaagggattaccaaccgggactacaaaccatctctccaccagtggcggaagcaacaaccggcgaggagccgaggatccactgccaaccaccgccaccccgtcggctgccacctttctccttcgcgagctccgccactgatgctgtgccggccccaaagccagaaacatgttggcggcgccccgatcgccttcctccgagcatcgctccaccaccgagctgccaccataggactgaactgataggagagagtgaagagatttcgctggatgggggcagaccatcgcagccccctcctcaccagttagcaaacaccctgctccaacacttgagaatctgagagatgggaaagagagggaagagggagaagagttggcacttgatatgtggatctatatgggtcccactcgcaacgtcataaaaaactggtcactatattactgaggggccaaatttgacatggtattgtgagttagggatgggttatactccctccatcccaaaatatttggcgccgttgactttttttaaaaaaattgaccgttcgtcttattcaaaaaatttaagtaactattaattcttttcctatcatttgatttattgttaaatatacttttaggtatacatatagttttacacgtttcacaaaagtttttaaataagatgaacggtcaaacatgtttaaaaaagtcaatgacctcaaacatttagggaaggagggagtaagtggtatttcgtttccagaacaaattttaagcttggcgacaaatggaaggacaacaagtgaacttattccttgcatgtttgctagcccgaaggaatgtgatttgcatcttgtccgggctttccattttggcccagatagttggaagcccattggcgcaaacgacccaatcacagcaaaccggagatactggacctgtggcaggggacctcctcctcagtaggaataagttcattttgactcccttaaaaagtgacccgaatctaaggaaaaagtacaccgaaagtccctcaacttgtcagcgagataaaaaacatcctcgaactgtaaaactagacacacgaggtcccttaactatacaaaaccggtcacccgaggtccctcggcggttttcatcccggttttgtcctacgtggcgctttgaccacggtcgtcggtggctgagtcagcgtggacccacgtgggccccacgtgtcagcctcttctcccctcctcttcacctctcctacccctctctctctctctctctcctccacgggcggcagccggcgggcgcaggcagcggagcagcgcgcgggtgggcagaggcggaggggcagcagctgcacgggcggcgaccggcgggggacgtagccgccatcgaagcggcacttgctggaggagctcgggcggcactagcgtcggccttgcccgttgccgtgtcgtcgactggatctcctctcccgcctcgcgccagatggcctcgtctggctctccattgaagaggatgcggcgaggagggagtcggcagagggggaggacaggaggatgcggcggcactcgatctctccgcggcggagagcgcggacgggaggatgcggccggtggaggcggcgtgagagcgaagcggaggcgatggcggcaggctacgccccatgcggccgcggcgcacctcggcgccgagccgctgcagctcgaggtgcccggctccatgctggagcacggcgcggatgttgctcaccgtgaacacgatctcggtgacctcccgccggagcagcttcccggtgctccccgccatctccgtgagcatcttatcacttgcagcgatcgcttcacggccttagcgcacgtcggcgtgatcacgactgatccggcgccgatggcggagaagtcgatgatattgtcgaggaggcgtatgttgagtatatatatttcagattcaagacagatagccgcttgaaaccttcgaacatttgaggcaacggtctcatttcctcacaaagctctgtcatttttgaaacagtggggacccttattgccgctgcagctgagggacgagatggagaaggccagaggatcactgcttgccagtgtccgcgggacaggaggttcaagcagctaggagtttttcagtgatttatttttcctgcttcttctgtctgtctactgggtgtgtgttttgctgctgcgtcaacatctcatgcttctgcctttgtctttgtttctgcgctacttgtaagctggaatccccagcagttacattgtaacgctccgcttctcgtgagacgttaaaaactaattcggtaaaatcctaattgcgaaaattttgttctttgtgtgcgagtctaagtcgtgccatggatctcaattcaaatcccgttgttccctctcatcgaaatcaaaatcctccgcctcaaatttcctcttccaattcaagtctccgaaatctaattccgaaagtcaatcccttcctttgaatcctcgccaaatacatttccgaatcccaaaatatccaaactcccgttttgtttccttccttgactccttgaacccttgtgtacaaagtatcaaatttagattcaaaacccaaactccaaatctctccaaatcaaaatctttcagcaaaagtctattttgcctcccttgtcgatgggctgatccctctctcccggcccttcccttcctctcggcccagctctctcgcgcgtgcgtcgcacgtgttcgggagcgagagacagcgccgtctcctttttctctctctctcggcgtcgcttcccgccgacgccgccccaaaattccggccgtgtcgccgtttcccgtgcgctcgcgcatggccgaccggcaaggacgccgctctcaccgccttcgcccttcccgtgcgggtttgcgcgtggccaacgccccggtcgccgctgcgtcaaaccttggcgccgcctgcatcgtgccctgccgctccgccgctccacgccgctagcttccaaggccgagagaggcagcccctgtctcactcccctctccctcctccttttcccgtttcagcaagggtcaagccctcctttccctcttcctttcccctttttcccgaccaccgccgaggtcatccatggtcccagccgctcgcggccaaagcgcggacgctggtcgtgcgactgcaccagctcaccgccagctcgctcctccttgaccgccaatgtcggttcttcctccctaaaccgacattgccatctattaaaccgagccgccccatctccctctcgttcattccctcgccaccaccgtgcccttgccgccttgctaccgccgtcctcgcctccctcctccatcgcgcgtgctggtgaagccggcgtgcgcgcgaggagctgacgcgggactccaggcgccgtctccttccccttccccagcccgaggccggagagctcgctcccgcgtcgtcggccactcgtcacagcgcccgtctcggctcggtagtgcatctcccgttctccctcctcgctccctctcctctccttagctctgggcagtagtgcgagtagccttccagtagcaagctggcgccgccccgaccgccgccgctgctcgccgtaggctcgccgccgtcgccgcccaaactcggtagtagccgctcatcgccggccttcctcggtgtagctccacccaatccgactctagaaatgaactctggaggtcgcgtagatgctcaagtccctaggaatcgacctctcgtcgccccgccgcgatttccccttttgatcgccgccggccgccaccgtcgaaatctgtcgccattgaatccccgcggcgaatccgagctagaggctcactccctcttatcctagtcatcattccggtgtactccctccctctcgaatcgtcgggttgtgctcccggtgaagccgccgccgtccgccgtccgtatcagccggcctccttcttcctcctctcgccggctcgcgtggctgccacgaaggcgccacgtcggcgccacatcggccgcgaccgggtcaaacacctagtcagccgcccccaccgccctttcttctgtgcgtgcggtccacggagagcccttaggctgcgcatgggccctccacctcttggtccacccgcgtgccgcgccgtgagccgcgtccgcaaaaccctagcgccccgcgccgcatgaacccttcccccgtgcgccgagtcgctgactcgtgggcccgtcccgggacccggcacgatggatccggtccacccggacccatcccccctctctcctcccgtgtgccccgctcgcttgggccacgccttgcccggccatgggccgcctcctcgcgcccgcgcccggcccattggctcggccgtgctgcgcttatcccttgggccgtacccgagccgcccaaggaagtctaaatcccatccctccttccttttcttatccaaaggattaataaatccttttccctttttcataaatcaattccttattcctaaaattccataaatcatttcctttggtcccgcgcgtctgtgactgtcaataatattcttgagaatattatttctataaattccataaaccattcctcttattccataaattccaaataaacttccaaaattcatatctcccgatctgtaactccgattgactccgttacacttccagtaattctctaaaattgagatctatctaatggcactactaattagtctaaataggatctttcttttggtcttttgtttaggttttcgattgtttgcgtatagttgtggttaccggatttttgtcgatcgggggatttctcgaagattcgtgaagactttgagcaaggcaagtcaccatttgaccaattgctcctataattggaaaatcattattattttgtttgcaacttgcattagtagaatcacacacttaacatgcttggcctcggtttgcgtgccaaaccgacggacctacccagtagtcgcactaattcctgtaggtcgtattaccctgattccttgtcgctccactcttgtggtacttcggtatccgtgctctctgagcgcttataccaactattccacatacaccattgtttgtcgataacttggggaatgggtttgagaagccttgaaaacccgacatgtggtgtcggcgtgtttgaaaataaaataaattgtgaaaactcgcgatgcgggggttatgcctgtgtggcactgtcccgtattcgcatataaggaccgattcctgtgggaaattcatccgagcatataacaagtgcgaccacacgggtgcaatgggacgcccctggctaagtaattagctaatcgagagagccatgatgccaagagacatgtggattcaacggggtggtgtcggggagaacccccgggcttcctggcacagtatggtttgggacctaatctggtgttggtctgggacccctctcgttggcatatggtaaacctgtgttggctttcgaaatgccttgtcatgaaagccttagggtctcccgacgtggctgatctcacgggctgggtgatccgggttagtaatgtcgtgtgggtaaagtgtaccccctctgcagaggttaactaactgttcgaacaactgtgcccacggtcatgggcggatgtgaggtgtttcctgtagcgtagatttgtttgcctgtgctttgtgaaaagttgttgtggtgtgagaatcgttaccagaatcagcctatgtggcagatggatgacctgagtggtcaagaaacgaatctgtgtgattcgggatgtctacgggcatcatagactaggcttcccgagtggaagcggattgctgtgctgctgggcagctggactctgggagtccgagaaaatgaaaaaggctctgggagccgattaatcaagtggaatggctctgggagccgagaagtaatgatctgacccgggaggtcagtacattaccaaatgagctgttgaaaaacatctcttaaagtcgaatcgagacgcaagtctcttttcggcccaaacttagaaagaaataaatcacttagtgatttcaaaatgatttcaaaataaaagatttgcaaaacaacctagcctctcttccaagcttgcattaaacacctaaattcccgtgacttgctgagtacgaaagtactcacccttgctctatataaatatatatagttcctccgcccggaagttgaagatgaagtgaagtaaagaatagggtttcgtcttggttcccagccgtcgcttgtggtgttgagtgttagttcgttggttccgctgctgctgctgttgttggtgtttcctcgttcgcgtcgtcggttgcattctcgggctgttttgagctgcaacctaagttaaggtaattaagtcctctatttattttaaggatttgcaatgattcatatttgtcactgtgggtaccagcactatgtcctgggactggtactgagatcgcggtttcgtaggaagtggttcgcgccgtttttcctacgacacgctcctatcaggtgccgttgtacggcggtgccggattggggtgtgacatacatgtactcttatgcttttctaatgaaagctgggccttggcctttcatcaaaaaaaaaatttgaggcaacgcaaccatacatcttttcataacaagtgtttctatttcagttaggctgacaaaagctttgcatcatatagtttttactcctgtctgcaacttttgttttgtcgagtgtaacatacacattggacaggttaggtgtatgcagattcagaacaattagctgcttaaaaccttcaaactctcgaggcaagctcatgatgcatctttctatctgtagatattccaaatcactggtagagaagaggcacgatagaatcttattataattcccacgggagaactcaattgtgatggaacttggttttttcttgacagcatgtgctccacctatcaaatacattgcgttgccaatcttgctgcaggtgtcgtggttgcgcgtcagcttcttgatgatgaggaggccttggaggttgcactcctcgtcggcgacgtagagcagcgacgacgcagacttgatatcgccagggacgccggcgacacggagcgcgttccgcttcttaattgctggctagcttggacacgacgagcgcggcggacgccctggcggcggcctcggcggcgccgttccaggtgagcatctccaccagccagtccaccgccgccgccgacgtgccgacccgccggagcgcggcctcgccgagccgcgggttcgccgtgacgttgacgaagatgacgaagggagagaaaaggggaaagggaggagaggaggctgacgtggacatctgacatgtggggcccacgtgggacctacgctgacttagccgccacgtagaccaaaactggggtcaaaatccccgaaggatctcgggtgaccggttttgtatagttaagggatctcacatatctggttttgcggttcgaggacgttttttatcccgttgataagttgagggaccttcggtgtactttttcccgaatctaatccatgaccctaaaccacaaaaccggatatctcgacccttaactattgaaccggtgcaatttgactcccttgacggttttgaagggcggttttgctgacgtgacacctacgtggcggtactgaccggatcttctttacacgtggcgttgacgtgacgcttatgtggcattagaattaaaaaaaattcatttatcattcacacataggatgacatgcgggacccacagaccatgtggggcccacatgtcatcctctctcctccccttcttcctcctccctcccttctctcattctctccctagcctttctcttcacccccggagcagcagtggggatggcggtggcgtccggcggtcgggacggtggttgggagacggcggaagggcggcggcgggcaaggagagacggtggcgagcggcggagacgccggggagcgaagacgccggggagcgaagagtggcgatggccgccatggatagggtgaggtgggggatctccccgacaacgttcgccaccgccgccgccgccgccgccgccatcgccatggcgtgcaggccggcgatgtactccgcctccgccctcgcgccgctgcgcccccgcctcctaccccttgtctgcgtggctcgccgctccccctcgtctgcgcggctcgccgggatccctgccaccgcgaccacatcgccccgctcctcgcggtgagcgcacccacctcctcccccgcttgccgcccaactcccttgccgctcaaggacggcctcgaagaagaagaccaccttgcaagcgtagatggctgcgatgacgcacatgagcgcgacggaaacgcactagcaccaggttcaccttggtagtgacgtgaaggaatctggtcggcgctgacgtcgccaccgtcttccacaggatcgcttgggtgctcacgccgaggcagataccgaacgccgacaccgggaaccggagcagaaacggccacgttttgtccaacggaagcaccagctcctccgatgactgatgcgacacagcacacaccgtgagctctctccagtgttccagcaaatcaaagcacagagatcgatgtgtggttacagaagaattagctcaagaaacttacccggagtttgtccagttcggggcactccagtgcggcgaagaagcgatcaacctgaggcatggacttggtgtggtggctgctgatggcgtcgcaaccgtcctcctcctcctcggggaactccggcccggcgccagccagatgggcgagctgccgctcaagcttcccggaccacgtcttgaacgagtcgtagcgcctgtcccgggacatcatccggccgccgcggttcgatgtcgcgcggcgtgccggcttgccgccagggatcggctgcgaccggaacgcggcttgtccggctgcacgaacctgacgttattgtttcttcccttgccctgcgccgccgtccgtcgccgcttgctctgccaccgccgcggcgggcttgcctgctgccacgcaccatcagctgaaggggaagaagaaggggagagaaagagagagaggagagagagagggaggagaaagaaggaaggagacaggggggcccaacgtcagtgggtccgcattttcttttgtgtgaatgattaatgggtcccacgcatatttttttaattctaatgtcacttaagcaccacgtgtaaagaagacccggttaataccgtcacgtatacgccacgtcagcaaaaccgctctctaaaaccgtgtaggaagtcaaattacaccggttttaatagtttaggggtcgagatatccggttttgcggtttatggtttatgaattagattcgggttacttttaaggagtcaaatgaactttttcctcctcaggacgatccactttgctggcttgggagttactatactagttgggacatcttcatgcacatgcatagtatgcgataataacatgatgatgtggggagtttactgaaagtctaaatttaaactcctttttgcatgattagtaatcgggcattctctgatctcgataactatattcaaactatggctgcatttggttatgccaactaggatagaatgcgtttgattggtttggtggatggaactgaacggaggatgatcgttcgattttttttgtgtgtttagttaaaaggcgagatagatgagccggtcaaaaaagagaatattatctccatatactaggtgaagagggaaaaaaattgaaaataataccctttttcaccgattttatagaatatacatgtttagcatgacttggtagaagtatacccattgccacggatgagtgtgcgaagtcacggcgagttcacacggaactcgtgatgtgctcgtgatgtcatcacagttcgtgcagtaagtacgtgaattcgtgtggagagccattgcgcaacttgtaccgagcactgcatgtcaacgagatttgagaaaagatcaattacatggcgtagactaattttgtcataacaattgaatcgagcagccccgttctgaatggcagcaacattctagccattatctaagtttctactactataattctataaaatattttggactgaagatttgatcagcggtgattcattacagggcgatcgcgatcatccagaaataccatgagattaaattgttcctacagtgacaggctctgactgcaggatggaagattgtaagtactgtactaaacacgaactagagctacatactttacccgtttttcctccttatctcttgctgtgtgtggcgcctgctttcctcgaggataactgacgccgagaagagccatttgccggatagaccaagtagcatacgcctgaactcgttgtggcgatgcgtcgcacgcagcaaatcaacctttcttcaagttgacaagtaccaggggcgaagcttgcacggttttctaaaccaaccaggcggtcagaggcctgcatcgatgcgttaggactggaccattgggacgatggcacggcctagcaaccgttgattcgcaaccgaacgacgctcgtagcagggacgagaacccgctgggcggtgcggcgtgcgtgcagagcaaaaaggcggcaatcagtcggcaggcgcaagtgggcttgcagcaaaccaaacgcccgtctgtcttcgtcacccctgccgctgccgctgccgctgcccaatcgcatcgcaggtcgcagcacggagcggcccgtcgcgctcggcggtcgggtcccttgtccacgcacgcctgcgcagttgcgcacgcagggccggtaggccggctttagctgcgctgcgctgcgtcgctcgatttgtttgtcgtaccgttgtcgcgatcccttcccgttccttgaaaccaaagccaaatcgatccctccctcccgtctccgcctttcggccgcctcacgcctcccctttttaaccccttccccggccgcctccctccggccccttgcctccacccacgtcgtcgatctcgtccactccaattacatccatccatccgctctgcaaccttctccggttgctgcgagcgagagcgagagcgatcgctacagccgccggtggccagccatggctgaggagcagaggtggcaggagggctgccaccgcctgtgcgccaacaactgcggcttcttcggtagccccgccacgctcgacctctgctccaagtgctaccgcgaccgccaaggccgggagagtactgcacccgtcgtcgtcgccgccgcagcctcggcctgcccggctactcatccttcctcgccatcctcgtcgtcttgtccggcgttcttgccttcctccactgccgccgaggctggcgtcgtcgtcgcggcggtggcgaaggcgagcaggtgcgcgagctgtaggaagcgggtggggcttacggggttcgcgtgccggtgcggcggcacgttctgcggcgcacaccggtacccggagcggcacgcgtgcggcttcgacttcaaggccgccggccgcgacgccatcgcgcgcgccaacccgctcatcaagggcgacaagctcaaggacaagatctgatccctccccacctgccgtgctccccgtcgccgccggaagaacgcgcggttggattccaaattaaatacgcttattattatgtaagctacagccggccggcggtgaaatcgccagccagccatgcatgcatgcgactgaaatgaaaatgagttcatatctctgctccttctattcagagccgattgcccgattgccaaatgccaactcgaaattggaaatgaaatcgactgcgaacgcgatgaactcagaataggtcaggtagattagattacagcgcaccgtgaccaaacccgaaccgaacattggaaaatttgatgtacgattatactacgagattagtttatgaaggcagcggtagttttctttgagggcgaacaagtcgcaggattagttggtcgatgacaacatttcgatggaaacaacgggtggccggtcacgcaagctacaaagatgttggattaaaaaaagttaaaatgagagcgcgtatgtccacacacttcactcgcgtgtaccgtatacgtcatgactaacaactaacaagcgctgcgggggaagaaactgagagcgtggatttgttaaatggaattcgggcgcctaatcaagcggagtttgtcaattcttttgctccgccgtgtactttgccggaagttacgtttgcacgtacagggagaccgtcagtttgtcaagatggtggccaaacttctcctctagctgttcttgtttgtttcggaagaaagcagcctttttcttttggacggaagaaagcaggccttttgttcgttagacgatgtaatgtttacgttgacagtattaaagaccgcacgagaggagaatcaaatatgggtatacatgtgctatgtttacaagcatcatgatttttcatgacgaaaacataataacatccaagtattaaaatgagtcgtctctgccctacgcttcattcagattttaggatagataaacgattttgctatatatttgtcgacaaattttctcccaaaaatttgacagatgtaattacagtacaatcgtagtgtaattacactgtaactatagtgtaacttgtatgtaactttcaaaaatctctacgtaatatgttatttcggtaaaatagaggttgtgggaacaaatccttacacatatgtgtgtgctgtgattttatttttctttctcaccaaaacaaatcttgtaatatatctaaagattcaaaattatatgaaacttatatacaagttacactgtagttacgtgcaagttatagtgtaattacatataagttacaatgtaattacactacgattgtactataattacatctgtcaaatttttaggagaaaatttattgacaaatgtataggtggtccctaaataaatagggacatgtcatggggcgtggctaatgggtgggtgacccccatggccccatcccccatatacgctcctctctcccattcctcctcccattcttctcttcctactacaccataaattttaaaaaaattaaaaaatacaaagttgaaaaaatttatgtatagaaatgctatatataaaagttatttaaatttaaattcaaatttgaaacggttatgtaaacttttgacttataaactttgggtctataaactaatatttgaattcaaattcaaatttaaaacgggtatgtaaacttttgacatgtaaacttttgccttataaacttttggtctataaactaatatttgaattcaaatttaaatttgaatcgggtatgtaaacttttgacttataaactttgggtctataaactttaggtgtataaactttagatgtatagaaatacgatattaaaaatatttgaattcaaattcaaatttgaatcggatatataaacttttgacttataaactttgggtccctaaactttagatgtgtaaatttgagttgtacaaactttaggtgcataaatttactaaaatagaaaagtaacgcagtgccaaaaaaggaaaccacatgaaggagggggggtgatcgctaggggcgaccgatcgccgttagccttttcgcatgtcatgtattgtcctctgatatgagtcactaaacctaaatctgttggttatatgatcatatatcaacgttataagcttcagccttcaggacatgtcaattcctataagcaccaaacaatatgaagcaacgcaaaacttaacttcttcgaaccgcctaaccagccaagagagggcttcgccctcctgcactaatgggcttctaaaatatactataaacttagtcaaacttaaattattttgactttgaccaaagtcaaaacgtcttataacctaaaacggtgggagtagaactattggaccccagtcatgtttgattttctaggatgataggcataggagtaaaagtctattttatctctctcatcttttgccctagattgaatctcatctctcaactataaaaccgggtataacatcttcctcagcttcaaaaaccgatgcaagttattagctccttcagtcgtttagaaagcggtttaggatgagtcagtagaaaaaactttaaagaataatagtaggacctatatgttatccgttctctctctctccttcccccctctctctctctctctctctcgttttgccgccttcacagcctccgccgacgggctctccgctccctcctccaaaacggctcttgaaagctcgcctcctccccgacgtgctgtgtcaccatcgctgttgccgctggcttcctagagcacgaaacatcaggggaggatgtgggtggacagaatgtgcatcgggatggcagacaacattgggtcagcgacgacgtatcgccaactctctcacctccctcctccccgcccttcttcgtcgcctccctcctctcttcctccaccgctgcaaactgccttcctcactagttgtcaccgccgccgccacctatctccgccttaccaccttcctcagccgcaacctcaaggtcgacggccgggaacggagacaggttgttgcgaaagttgttgaggcggagctcagccacacgcacgacatgcgcagaaggggaaaggaggtagccagaggaggagtagaagcatgtgggcagagacggacaatgaggacaaggagttcggcgatggtggtgccgcacatggatgaaaaggtgggctctcgggcaccgcgcatggaggagggagcaaagctcacgcatggtctataccatcgttgctatgcccagcgccctccaatacacatccgccacagaggattccatctcacatccacctctcggtgcccgccatcctcgacatctccatagctcgctctctggttccatctcgccattgttagccacatttcccaatctctgttacgttcctcaagggtggtagccaccatctctaacgatccccttgctagccaccaccgtgccatccacagaggaggaggacgagacggtaaggggcactatggagcagtagtggcagcaccgagcattggagtagtgtcgttgcgtgcttccatggccacactctctcgcacaagatggggggaagagaccgagaggtgacatctacagctgccaccaagaggggggggggagagagagagagagagagagaggagaagtgggggaaataagaaaagcaacttacatgtgggctcaccgcttatgtttgcgatgtctcaataacacgtgggtcccacactcccacttatgaaaaccgcttcctaaaccactaaaaaggagctgatttgcaccggtttttgaagataagggaggctttataaccgttatatggttcaggaatatgattaagcggaagagatgagggaggcaaataaacgccggatacgcggatcgatcgcgcggtcgcgtctcacatcgatgaacgacacgtacgcgtgccttgccaccttgccgggccatgagtggcccgatttattaagccgtacatacgccacattagttgtccaaaagaaaaaaaaacgcctctttcaatccaacgccgatcgatcgagtcgaataatggatctctccggcgatcgatttggcggtgcgtggacagaataattgcgggagtacttctcgttgtggttgaaacagtcgaaagccaatcgattgctaccttcaattcgtcacgtatcattctgctccatcccgaattcccgatcgatcgaatcgcccataaattaactcccaccaacgtagtacgtaggcaaccacctacttgtctacatgtacgtgtgtgcaatggccaatggatgatagattaatttccatcggtagcaacgagcatccaagttttagtggtaggcgtactcgtggatttgagagagttgctgctccatgcattctaaaatataattaataagctagctaggatcgaataggatctattctaaggatttgtttaacacagcttcagctctagctccagagttcagctaaacagttttagcttcacctaaatagggagtggagttggatggagtaatatcaaaaaatgaactagaaatgtatagctggatttagtctgctccacaactacacttcaaacccaacccttaaagctaaatttagaacttagaattctatcaaacagaccataatacaacgaatctggatatatataggggtttgttcatattcataatattatatgtttatttaatcttagttgctatattttgaaacgaagagagtagcttaattgatatgatctgcatcaaatcatcaacaattgttgtgcttgctttcatgtacatgaaggacgaagtaagaagtccgtgcttttttttgttttgaaacgaaaaaaggctgtgcatttgaagtttacaaaagttgagattcgttttgctcacgtacgtcattcgcgtcatgatgttgatcagtacgtatcgatcgagtttcatacaccgcaatcgaactcgatcgatccttgcacatctacgatctgccatgatgggtaagtggccgggtagcttttgattcaaaggcgacatgtgcgtacatccccatgaatgcaacgcatcatcgcccacgttcacgtatgcatagatggggtgcgtgtgcatctattgacgtagaaattaaatgagatactctaaagaattgctagtttaaaggtgactaagatttcatcaaatctcaatcaacctactctctggcccgcggccgttggattgaaatcgaatggctaggagttgtcttcaagctctagctaggggagagggagagaagaagggtttgcgacgaaagactcactagtaacagtgacaaaagtattagagggataccaaggaggtagcggacatgtggtggtcggtagtcacggatgagtggcgaggcaacaatggtaccatctaagctgcggggttgatggtcactagcaggcgatgagacaacaacggtaccatctgagtcataggctggttggtagggtcgacgacaatagcgtcagatctgcattggttaggaagggggcgatgggaattgggagcgtcttggcaatgtgagtagccaatgacgagaaagatagatgcggagggtacacctctcgccatcacctaggcttaggaaggaggaccatagggacaaggaagggaggagcggtcgatctggcttggcacactgacgtgtttggtggcttccaatgccgatgaggttagggggcagcatactgggttaggaggcaagtggtcaagctcgagtacatcgtggtgaggaaaaggggagaacaagataggcattattatgtggcacggatcttagctcaatctgagccttttaaaagtgattcaaatttgtgaaaattttcaggttactgaaaattcggtacattatgcggtagaatgtattcaagcatctctttacacaaatgacacaaccatctacatttcaccgcaaataaaagagcagtgctaaaagtattttagaaaaagagtgaattgcttttgaggttatcttatattaacaaagtttcactcactactacaaaatggatttttcctaacggttgttcgcgttttctacggtggtcggctctgccgccaacaactaaggaccaatgaaaatgaacaatcttcacatgtggaacttcaccgcttgtgaagattgattttcacaagcggctaagttaagctgactcccaggaaaaatgatttgcgtgcacaaaaaaaaatccacaaatccgcttcccatatctgagctccgccgctggatgtgctagccacgccctaagccatagccagatccgctgcaccccgagccattgccggatccgtcacccgcctcccatgaccgagctccaccgcctgtggtgaccccaccacctcaagctgtcggatccaccactcggggcctgagccgccgcgtgtttgagagatctgggagaggagagggggtggaggagccgcaggaaccttctcaaggccctattgtcgttgtcattgtcgtggcagccgtcatcatccttgagctcgccattgaagttgacctcaggatgttgagcaccgccccactggattgacctcctccaccgttgtgcctgaccttcgcttctgtgaaagcgaacccggtggtcctaagtactgttgccgccggatccacctcctccaccgccaccacccctctcatttgctgctgtggaggtggatctagcggtctcaagcatcgccgccgcctgatacgtcccctccaccatcaccgccaccggctaggtgtgggagaggcaggagagcggctaggatagatccgcctcgaatccatgtcctcgacctcgtcgccaccgctgcctccaccattccctgtcttccaccgcgtgcgcaatccgtccccttggccaccaccagccaccgccaccatccatttgttgctgccgagctaccgccaaaacccccatcaaaccgagagaaagaaaggtgatgaaggcacaggatctgagagagggttggagagacagagaggaagaaggtgaaggatagagagggaggagagaatgaatggggaccatggggagagggaagttttcatatcgacctcgaattttttatgatgactgtctcagagaactgcctacgacaatctatattttcacaagcggttctcttaaccggtcacatgtaaaaatagtattattttcacaagctgctactttaggacaatcatttgtaaaaatagattttcgcaagtagttactaactagggacctcggttgtattttcactagcgttttttattttatcctctcgagaaaaaaataggtaacatcaggaaaaaaacattttgtagtagtggctttagatcaccctgtaccctagactaggttattttttctttatactgcaaaatattttctcgagcacctcaataacctaaacacatcagcacccatacactgacaatcttccaaactttcacgtagcatctcacacactcctaccatgagtggcaactgaaacccagtgacgagatagaccgacaactttttgtcaaaataatatcgatggacacaatttggtgatggggcaaaagtatccttatggcattcaacttggttggacggacaaacgccaggaggacataacctagaaattaaaaatgctactactctagaaaataaatggatccattagcatatcctccagaggaataaccattatgattatccaacaatttctctgtccttgtgagcaagcacgcgtgataccatgctacatgctgatagggaagatgaaatcacacgggtggacgatgtccaattccttgggtcgcgacagacaaacacgctttggaatttctgggcatcgcaaaaaattcaagttatttgcctgactagtaccaaaaccaactacggatgatatatatagatttttaaccagaggcgttggactcaaccctctcagtggcctctatagccatgccccccttgaatattttcataaaatatttcctacagtaagcatgtatcggccggccaagaggtggccaaggtttccagtgttatggtaaccttataacttaattctaggaagtattaattgagagatatcaaaattaaaactaaaaaaggtgatacctcaagtattgtacaataccttttcacaaaatatagtgatatgaaaacgtttttccaggcgaccgaaacaagttttcatgggtaacccgtcacgtcgcttacgaattaaagcctatgaaagtcaattattttcgcaggtgagcatctgcccgtttgtgaaaattgatattcctagccggttcagttataccgttcgtttggaaataataattttcaataaaaaaataatttcccttgcatgcagccagttgccacatcaatttccgtatagatcaatccaaaaatcaagcaaaaagggaaatatcgattcatcatatttgcaaatcaagctgctccacaaaattttgtattcacaaatccaaccaagatttacaagaaaaaacacgaagccgcacaacaactgcaatgaagcgattgattgcaatggacttgaggccgtcgtcattatcgatggctcgcagttgtcgtcgccgtctagtccaccttcctccgctgtgctgctgccatctgctcctcttctcttgtcgtcgcaggctgcagccacggctagtctcctcctctccggtcagatctggtagagggagagccaaatctaggaggagagtggattggaggagcccttcgaaggccctcctgccaccggccgctacaagtcacctttgccggcttcctcccgtctggcaagatatatctagcaggtggggctagatatattggatattttgctatttttgtgagtgtgcactttttagtgcacttgagaaaataaaacatattgtatatcataataaaactatagcggtagtgggagttgacagtactggcctctagctagccgctggaggaagcgtatctctagtcatgctagtcacctgggagacttggaagaagtgaaacttgttatacaacgcaatcagatagaccggcttatgcaaggggaagtgagaaaaagaaaaaaaaatcatgaatgtccatatctataatatacaatatggtaaatttagagtaagcagttagctatattatcaggtcatgtttggttgaacattttacattgccacacctacttattatgctaaagtattgcgagccacgcattttgctaacaaattgttgatcacactttggataagagttgttaaaattataagtattacacacatgtggtctgaagctaaaaaatcgtggcacactaaattgaaccaaacagtagaccaaaggagtttggcaaaagtatgataaagtttgcagtgaaccaaacaattcatgagacttgctctggaataattctgctcgctcggcagcaccaacaaagatcgagaaagctactacgaagaacagtgtgcactgctgcgatcgatcgatcgatcggcaacgtcgttgctgcatgtgcatgcatgaggaaataattaaaggaaagcccaaatgatgtctttacttttaatttgtaatcatgcgcatgatactagtcagtcagtcagtcgtcgcttggccggccatctccacagctccactgcttgctgctggtctcttctcacactgtccatgccttgctggagcactgcagtagcagcagcagcagcagcagtatgcgtggcgtatgaacaaatgatgatgcatctgttttacagtgtttttctggtgaagattgcagtgtcagggattcgacgaccagatcgatatggtgtaccgatcgcctgctatgtttctgaatagtaataagacaaccagctgcaaatatattttaaaaagataaataaagagagagaagagcagcggactacagatttatagcaagctgtagtacggactctaagacacagtgagtgtataataagtgggatcaggtattaataatgtagtatgtaactattgtatgaatgagttattagattggatatagatgaattgaagctagtagttggctatactattaaacttgctctaaggaggtgtttagatgacggggccataaagttttggcgtgtcatatcgggtattacgtagagtatcgcatggtatgttcaggcgctaaaaaaactaattacagaatctgtcagtaaactacgagacgaatttattaagtctaattaatccgttattagtatatatttattgtagaaccacattgttaaatcatggagcaattagacttaaaaaattcgtctcacaaattagtcgtaatatgtgtaattagttatttttttaatctatattaatactttatacatgtgttcaaacatttaatatgacaaggctaagcagcttctagttccgctgctactaatagtattacaaaaggaatttaagagggcatggaagtgcacacgtactaatcatgaaatgaaatgagactggtgtccctgtggggagctcttccagtcaagattttacatgatcccgattccagaccagatcttcaggtcaagattcgatcaaatcagcataggcaagttgcccccattttccatgggaaattctcctgttaatagaggggatggttgaaattaatttcccacgaagaattcctttcaaaaaaaaatttcccacgaagaattctcctgttttgcaggggatggggatgatcctacgtacccggttcccccggagacacgcagaaaggggctctaaattctttttttttttcttcacgtcatgtcattatgttacatgcgatctttgatgaataacaatattttgtttttatcatgtcaactagtggatatatattgatataaaatatgactatatgtattgtgctacacatataattggcgacggaaactctgtggggattaattcatcgtgcggggactcgaagtggtggcctcgatagtggcacagggtcaccgtggatctctcccctctctagcagatctgcctgggatggcgctcgataacggaaccagtaataatgacgactgccgttttctcttcacttgccacccccattgagcttgctgtctcaatagggagacatggcatcccgacgacctctttcatccacgtcatccctcccaactcaggatcgctgccaacctctgatctaataatgtcatcatcctcttatgcggcaatgtggatcttagatccggtgccgctgaactttgattttatagatcatgtgtcctatgttttcttgtccacgtcaaggacatgtggaatcacaacaaagtgccttttgcagtcctgcttctgcacttttatctacttaaggcactcgtgccttacaaagggcacgctaacaccctacgagataactactcctataactactcccgactatatgaccgactatatattactcaataaggcaccatattttgtatgtccttaggctactcttgtaacacataaattgtgcacggattttttaagtatttcgcatagttgattcaagtcatattgggatggttcaagcatctttcatatctgtttaggtgcatggttttggatatcctttgccaaaattaagtacttaaattaccacgttccaaataaaaaacctaattaacatgtttaggaattggcatttttgtacttcctctgttctcggatatatttctagtatttaaattttatactcccttcatctcataatataaggcatggtcaaacttgacacggtcttcaaaactaatcttttacttataatttctcatatactataaggtttattgcacgaaattataaccatcttaaagtaaatttaaatgtcaatccaattatattaatttttgcaatgaaatttaatttatattataataattattggtcaaatatttttaaagttgaatcttggaatgtgtgcacgccttatattacgggataaagggagtatgtaactagaaaaaatacccgtgcgttgcaacggatgaatgttattgtaatcttattattgttatatggtttagttaagttgaaattcactgtgggaatgcaattggatatatatatttctaaaaaatcataagctgcaattagtagtccaattatcttatgttagcatgcgagttttttaaagcgatatcttatacgagtccttttgtatttctaacagcgaacgaacttaaaatccgactcaaatatgaatctgtatattcaaaatcgaacaaacttaaaaatcaactcatacatggatgacataccaaagtactagcaggggcggattcacaatgggggcggtggggtcttgagaccccactaccgcccccgggacagtggagacccccctaagcccccactaaatttttttccatagatacataggatgtggggactggaggttcgatttatgctgatgtagtttattcagcccccaatattatttttttcgagatccgcccctaagtaccagtaaaaatatctttaattttttttataatagtagagatagagatatagtatctccggaacactgattccaacactcgagaatctaagcattttaggctgtgttggacactcaatgttggggacggtttcctccggcatggaaaacggagcagttcattagtgcatgaataattaagtattagctaattttttttcaaaaatggaacaatataatttttttaaacaacttttgtattgaaactttttgcaaaaaatgcaccgtttagcagtttgaaaagcgtgcacgcggaaaacgagaaggataggttgagaacctggacaaatgaacagagcctaagtcattcaaatgcttagagcacccacaatagttatctataggctctctacaagagatccatgtcagcatatttttctacttggaagagattaaataaagagagagagcaaaactatctactaacctagagatagtctatagagaaaaacgaggcaatggattagacagctatagatacccatgtagacataccattcaagtggtttactattaatctgatctattgctgagatgtacatgttttatagatagcaccttactttaccattgcgggtgctcttaggagtgaaattcaaacaattaaaaatatgaccaatgaattatcactccaaacaattcacaatctagaaatacttgtcatggacaatctagtatatttagaaatggcaattactcgcagtagacttgggatgaaggcagacaaggaggagaaaagctcaagagagagaggaggaagaaaacgtccaagcaaagagagccagagagggctggattcccagtgatgatgatgatgatgatgggcctcgattggccggcccaagattcgtaatgatggctcatctccgggttcctctcctttgctcatcatcatcgccccgctctgttttctcctcctttcctttttttccctcgctcctctccccatcttttaatcccttcttcttcctcctcctcccacaagaattactccatctccctcttcctttaccaccatctccacccatcatgatctcctcctcctcccattcgagtgcctcactattgcagcggtagcttttcttcgatttttaccatgcctctctttattttgcactttcggtccgttatgctttgcaattagcatattgcttgatatgggatgttaaatgtctcgtgttggcgagatgagattgagatgttgcagtggcagcgccaatggtgtaggaggagggcactgtttgaattaaaagaggagaatcatcagcaatgatgcccgacaggctggactttgcagctcccgcgtttgtgaccatttttttcagcaactgctatgatcaacttcagtttaagcttcgtttagccgctggctacactgcaccttctgtagcttgatcaatcttcccatcccactgagggccggaagaattatcatttccccgtgaaatgttgcgaaattcttgtgaaaagttctgcggtgttccacgcgcgcaaagtcttagctgcttgagaatgtagtgcacatggctataaatgtttatgagaaaactgataactcatatgacatgacgatagttttggctcagtggttttaaataatttaagaaaccttttataaatcatttttaactgtattttggctacatacatctcaatgtagaggttggattgaatcattgaattccaagttcttattggttacccatattccctaatatatgttaatgctgaaaaaaaacttacattgaaaacattttagaatcaatttcaaaatttaaaattaaaatttaacttttgctttgacttactagggtaaccaatgggctccactgtctaaaaaaatgagtaaatttcacaaaactgcacgttttgtagtccaagttgaagaaaaccacacacactttaacacttggcatttaagtatatatattttggtagtgtagtttcaatgaatgaattcacctgcgagatgacatgacagtttcacctaggacaaggacatggcatcctattaccagcaatcgcacgaaattaataggatgccacgtcctcatcctagatggaacaatcatctcatctcacaggtgaatccattcattgatagcgtggttttgtgaaactaaactaccaaaatatatgtacttaagtgccaagtatcaaaatgtgtgtggtttttgcaacttgaacgataaaacataaaatatgtagttttatgaaatttactcaaaaaaaattgtcgcactattttatggcatgcaccgaaatgcctctcccggtgagcgtgagctcgctaacgctaggccgctaccggaacaagcggcgcctataaataaagccccaccccaccactgcgccgcaccaagcacacaaatcacagctgctgctgctgctgctctgctcccctcctaccacctgcccttttgcccccacgcacaacacacgtcgtcagcctctgcctttcacgctgccgccgccgccgcgagcctgagctccggtctcctcgctctgcaccgactgtctgcgtcatcagctccggccacggcgtggtatacctccagtcttctctgcactgcactgcaccgcctgtctgtctactctgctctgttttttggtcgagtgcctccactgtctttgtttaattatgtgctcgagacgagtgagtgggtgtcatcttttcttctaatctcgatgtaatgatgcatacgttatgtatctatgcattcttttattacaaagaaatagaagaagaatcccttggcccatgaaatggtggagcagaagctactactactgctactgcttcttgtctgatgaactctgacagtgttagtttgtgtgtgcaggcgatggacagtctgaacacgaagctgtacctgcagaactgctacatgctcaaggagaacgagcggctgcgcaaggcggccgtgcttctcaaccaggagaaccaggccctgctctccgagctcaagcaccgcctcgccaggtcgccgtcgccggccgccgcggcacccggcgtcgccaacgacagcaagaacgccgccgccgccgccggccgccacgctggcccgcctccggtgcaggacaagtcagcctccaagtccaagtaggctatagccacgagctcacagctgcttggtcacagagaagcggatgcttgcttgagccactgtggatgcatggtgatggtgctgcaggtgtttgggggtgtgtgtgttttaactttagccgtggatgtcaactaggaaggcgtttttaattactttcagttgctgaattctggattctctgctcactggtatgtagtcttaacatgatatccttgtaatggatagccaggttaattggaggtacatatacatagctttgtttttttagcacatagtactagtatatgtttatgctcaacacttacctcacgtggctgatactacaatgcatcatgcatggaaaaatatgtgatatttttttatttgttgaacttttttaaattttaattttaaaaatagcctttccaatacttatttttaaaatttgaatcttggtcaggcaaacacaactagcaaaacaacattatcaggctggtctaaatgtggtggcgtggcaggataaaattgtcatgcctactacggttggcatgacagtgttattttgccacccgcatgacgtggccaaagagtttagattttgaaaaataattttttagattggtttatttaaaattaaaaaaaataaaatgttcaaaatataataaaaattcaaaatatatagtgtaaaaatttaaaatgcagtgtaaaccaacaattagatataaaaatggatgtttaagatttgttcacgctatattgagtacttctagtagtaaaactacaagaaataaaaattttgcttacggtgatatgaataaatcttaaacgtctaatttttattaaaaaaaaaaaggtttacactcagtatgaaagttgcgctacatatttttctgccatgcatgatatggctgattaagacatcgtgaaaaaaaagagagatgaactgtgtacgtgcaaaataggtaatccaaagattgtattcactgcaatcacatcttccctgtgctgcacacgccagcatcgatcatcattctgcattgagtaccctgccttttcatttgtcctaccaaaccatgaatcaggagctttcttgacgtcttatttggattcaatcccacattagataaaatattgattatgggaaaagaaaagaacttaaaacgtgaggatgtgttcttcactcattccgctaaaagctactatcagaccatgaccatgtttgatttagactgttagacagattaattatttctagggaataaattgagtagtttaaaaaataaacttatcaaatagcataaaacaggtgatataaataatgtagtagaaaaaaatgtttttagaaaacacatttttctaaattcagattaaataatccatttcaacaatatgatggacaacgtgaagaacatagctcctcaccttgtttcggcatgtacaacaaatcaagagatatactagctccgaatattgttatagtgttcgtgacgataacgagtttggacaggtcattatgggctaatagtcttgaatgtatctttgtggataaatctaaattggaaaaattacataaatcaccccaattatcactctagttttgagactccaccctataattaattcatgttgttacaaaagctaacccaccaacactgccatgtcgaaattgctccctctgtgcatgagaactagctaactcgaattggacttacctcgtagccacgctgaacgagcctgacctgactgatatgatccactgtgaatccacgtcggaagaaatgagacaaaccaactactcatgtgtcttgggtggatgaaatttcgcaacaaaatggatgatgggatggaatctcaaactagagtgatggggtagtttaatactccctccgtttcgaaatgtttgacgccgttgactttttagcacatgtttgaccattcgtcttattcaaaaaatttaagtaattattaattcttttcctatcatttgattcattattaaatatatttttatgtagacatacaattttacatatttcacaaaagtttttgaataagacgaacggtcaaacatatgctaaaaagtcaatggtgtcaaatattttaaaacggagggagtaagtaattttgccatctaaactatctactccctctgacaccgttgaccaatgcatgattgtattatggacaataaaaacgtttatattattgaccagtaaaaacttttaaattttttaaagaatacaagtagtatagatttgtatttagcatgcaaagtggtttgataatacatcttaaatatttatattcttttgctaaaaagatgaacagttaaaatttgtgcacaaatagtatccggtgtcaagtaaataagaatggagggaatatctagccggaatctaaccgtagtgaattagagaagttgatatcaacatattagttataacttgtgaattattgatttaattaagtttcaaaattactatatcgatgtagcacaataccgtcttcggttccataattattgaccttttggatgacgacacaattttcaaaatatatattttactatgtttttattataatatatacattaaacaaatatatttttacttttcctatagttagtattttaaagttattgatagtcaaagttataacattatcttgtgtcgtgcacccaaaactataatctcgaaaaaagataactttctatgaacattgcttataattttttttataaataatggagtatttgttagccttaataatatttagttccttgcaattttcctatgtccataatctatttaattgaaacgtgctacagcttttatcctgttaatcgaaccataacaaggaatataagcatatatatctcgtcaatattctcttccatgtagagtatcactccaactccaagctgacatgcatatcaaatggacgtaactacacagctagttgtagctggtttgtctaaaccaactactactccatctataaaagataccatccacctatacttcaaatgcaattttctcttaaaccactcatccgatctacgatccgattacaccgttgtgttcgtaacaattaaatctttacaacaagatctcacctgattatattttgatgaaaaatcacaaattgcttttatgatatgtctaaattacttttagatttcactaagttatttcttagatatataaaagtaaattcagtaaagcctaaaattactttacatatattatagaagtaacttagagcaaaacgaaggtaactttggcatgtcatttgaagtaaatctgttgtagagataaaaacatgactctacctagaaattaaattaatcagcacaaattatgtaattaactaaaaacaataataaaagtaatcacctcagagcatcatgaatgtataggcacttaaagtaagttgtatatatgataattatatatatgatagtttgttcaatgaaaaaaaggcattaattaaagttactttctttttttataagttacttctataatatatgtaaattacttttaggctttacttaatttacttttatatgtctaagaagtacttagtgaaatctaaaagtaatttagacatatcataaaagtaatttgtgatttttcattaaaatataatcatgtaagatcttgttgtaaatatttaattattacgaacacaacggtgtaatcggattgtaaatcggatgagtaatttaagagaaatttttatttgaagcatagatgatataaatatttctcctacttacttaatggattagtactatagtaaagtaagattcttcaagttaacacatatctagatagaggtcgctcgttatgactaaatcgagagcgctctcgatttagattttgcgatatcaaatatagtagtatcagcggtagccgaacctgttaggtgggtgcaatctagtacacgaatttgtaaaatgctcgttttgatgcatgaacttatttggtgtgtgtggagaaaggctaaaaaaacactacatggctaacttattgatttcacctctttaataaaagaatgggatttagagcctgtttagattgtagccaaaataaatcttaccaagttttggcaatgccaaaattttgacaagatgacagtgttgctaaaattttcaaaattttggcaggatttattgaccaaatttagcaacaaactaaacgtagacatttttttttggtaaatttgccaaaaaatggtatagttgaaaatggcatcaaagtaaacaatcccttagttatcttagagaaagataggaaaaatcgagcatcgatataagggttaggaatatatggaattcatcattccattgaagaatagagacccgatttataaatatagcacgttttatgcatactcactacacgtatgcacattacatcctaatcaacatcaattttgtaaaagtaacattgccaagccattttggttatagttcgcacaaactagacaagttcatgtaccgaagcaagtattctataagttcatatactaaattgtacctactttgtaccgacaatacaattttctctatgaaatatcttaatgtagataataaattcatcaaattggtccatcagccttggaccatccgcttctccagtttttttttttggcagaacatgctcttttgtattaagaggggaaatttcttttaaaccttcacaagcaacgaaagcaaggaaacaaacggataaaaagagaaaaagaaagggtggcgagttgcgtagggcttatctcgcagctagttttgcggccggatgggggtggctgctcagatgggcaggccggctgcacgtacgtcagagttcagaccgccgcctcctccgcggctgcgctagcaatttctccccaagatctactctcgttgttcttcagttaatttagccataggaactagtaggaaggagtatccaacatctttgctgttactatctgacagtcatcacactccaagcaaaacgccgagagccaccttgtaatgagcatgactgtatatgggcttcaagcagagcttcgggaccagcactgaataaccagacaaagcagggaattttgtatacatgtatcatgtgaagcacctgatcatgagtcataatgcccagtgccaaatggtactgagtacgttgtgtacacatgcatccagcagttataagcacctgatcatgagtcattatgccaagcgccaaaccatgccgggtaccacttcactgaaaaacatgatgatcatttggcaacacgaagcagacgctgaacagacagatcgagcagagaaacaactcaacgatgtcgagtagagcgtggccctcacatgttacacctacggtgaatcgcacaaggccatagaaaagaaggcaaaaaaaaaagggggggggggggggttccgtttcgtttttctcatggcggagacaaacgtactacactgaaagcacgctgcacatggctttgcaaggacgaagggttgaaaagtaagtgataactgataaccccgacatcccattacgattcacataacaaatatgtacaaacttttgacactgcgacaacgggttctttcagcctacagagcgtggctgcgctgcacacccgcacggcaaacgacgaagagaagagaacaaggcaaagcccaaaacgggacacgggctgccaccgtcgaacacaccagccaccaccgtcgctgccgggctccagcaagtacacagcccaaaatgggacacgggcccaaaatgcattcgctaccattactctaagctaaaaagctgcagaacggcagatggccgccaccggcctcggtcgggtgaccggccggcgatcgatcactcgtccggcaccacctccatgttctgctcctcgtacttcacgcccacgaggaacgcgatgctcacctgcacagattagcaaaggaaatcgtcgtcagccgaagccgaaaaagcgagataagactcttgacttctgctgagatttgatcaccacaccaaaccaatatgtagttgttacctgcttggggtcgtacacggcgtactcgttgtactcgagcgggccgtccttgttcgtggacggcaccagcttgccgcacggcaccgtgacgccgtccctccaggtgaagtgctccgacgggtcggtcgtcttcctcccgactcccttcacgcccatcttcttctcctccatgcgtttcacgtcctagcaaaacaccacacggcagcagcgtcaggacccaaccatggcaacattctagttttttagataatggcaacattctagtaaacatgtcaaagatccaaagatcaaagatcagagagtacctctgagcctggcgtgcctgttatctcctggatctctttccccagagatgccaccgccaggaccaggtaaccctccggacgatccaccgccgtgaagccgtagagcgcggcttcggctgctgcgtctgagcaaactatggctttgccaaactgcgtccatggatcgaatagtcttttagaatctttcagcacaatgctaggatgagaaatgatttgcatggccgacgaattattaccatgtatcccggcactggtatatggcagacagcaggcacgaaaccatcgcgcaggtgcctgagcaaatttgaacttcttgttcctgtggaaaagagaagaagctcatgtgataattggtaaaccattgcctagagtacccaaaaagtgacataaatttaatatctgcgagggggttgagtagaaagttataaacacttaccacaccagaggagaactttgttcggaagtttctttatttcatcataagaaggaagagcactcgattcaacagcatatatccgctcgacagtagcactgtaaacctgatgaaaataggcatatttcaaaggaaaaatacgaatttaaacgaagattctttttttctaaaccaaaatgaatgggagtccaatgtagcacaatctggcatcttaccacatcgccaaccttgacaggctcgtaggttttctccagatacttcaggatcatcttatagtcctccgagtcttcaacaacacgattgatagaacagcctagtttcttgtagcattgagacagtgggtcatctaaagttgaaccaaacacatcaccaataagacgagaagcgacatttatatcacgaacagtctccaaaccagaagccacctgcatgccatacgaattatgaaagaaagaaagaaagatcaacaaagcagattaaacagaccataaaaataacagtgtgagtatagatgcactgtgcatcgtacattgtcagcaatctgttcatatcccttcattgtatatggacgagttgtggggaatagggtgaaccacttattgctgatctccatccagaatgcgtcagcagcaggcccagactctggagcagactcgacatcttgtttccactctagtagcgtctcctcccctgccaaatggaacagttgatgaactctgcacgccatgagtcgcgacgatgatgaagtaactgctaaatgcaataaataagataacctaacctcttttcagatggagatctgtaagcatcccgataggaaggtctggcacatcatggcccatctctgtcaaagcatacctgtgacaagaagctctaagagtaagctccataagaaacacatgatagttcattatccaagcggaaaaataataataaaagaaccacattgtctcaactgagtaactcagaagtagtgatttatataagacctgtatatttcttggctgcatagttgtttcatgataaaagtaacagaagggtcaagcttgcagtgtgctgcagcagctcccaactgacgaagagccacaccaccatggcgcacgtcaacaccatcatcctatcaaggagaacaaaatacaacaacattcatgggtaatacaggtatgaaatcaaaaagaaataagctagaagagtgaagtaccatgtccaagggatacatcttcatacacttcttcttaaatttcttctctctctcccatggttcaaactcatttccagtaacctcctcaaaaagacggacaaattccttgatagcatcattgaaacgactaccaaaatcttcaacccgttcctctgccatctggtcatgtccaataggacccttcttgtagtataggtgcaaatggttctcaggcaccatgatcagctgcataatgcataacctgcaaagagccgtcttaagttgctaaatccagatacacttgactgccacccattcccttaatatgtaatgagaacataatgcttaatatgtaatgagaatataaacatactggttaatatcgcctcctaaatcgcacacagaaaaggcacaattgtagatgatgccatccttctcatagatatgtcctccgtctttctccagtttagaatctttgtgcactgctcttttgcctgcaagtttaagctgaagaaaaaacaagcaaattactagagatactaaaaccaaaggtgcaatttatgaaatgcacttgaccaggcaacaacctctgcagccaaggtctcgatagcctcctcagttggatcaaggttgcccagcggcagccctcggccttctggaacaacatcagatgcaatatcataagcagccaaaggttgcttttccttcttctggacgctatcaattatccaattctcactcacaacaggagttccacgctccctgtggtatggtcccagatgtaagaagaaatcaatattcagtaatacgttccatcatccagtgtcgcaagtatttttattcaaccatcttaatccattctatcgctgttcagaggaaggaatatatcaaagaacagaaggcaagggcttacagtgcttcggcaaatcctccagagccaccttgatgtctctcagctggggaagccactacacaagtgacacctgcgagcacaaaggaatggactcccaactgtgttatcttgcattatgatgaactagatcagactagattaaatagataagatacacaccaatcacggagttgttgactttccctccatgcttcataatctgctccttgaaataaccctgtccattttagtaccaacagaattagattcctgaaacccattaacatagagtgaattggaagcaatgttcagaggaattacatgtgagcgtgacatccttccagacaatgcaatcatcatgcccgagaagataccctcgtcatccaaattacgtttagggtacttattcccttcttgttgcttcagccactgcagaagaagaaacaaaatgcagcttatatacagtaacccaagacatgcagcaaagatagcaaataaatactcaaaatgcagcttcgttaccttgcgcacgaaatcattcttgacatcatcagggacctttataggaccacctctcctcgaaggattgttagtactgaagctacaacatgcccactcactgtgagtcccagtgcaattgtatttcaatcccttacactcgagctgaccaccgcatacggggcacttgtcaagaggcccataaaacatcacatcctcactgcagcgatggagcaaatcgttacactgaatccaccataagactaaattcgatattttgataaaagaatagtttcatatttttaaatagacaataccatcttgggacaactgcatcttctgatccagatgcatcctgttcattgccttggaggatcttgcgcatgtcctcgatcgtgaggtgttcccttatggccttgcagaattcagagaactccttcacggctgttgccttcccattcaggtcagattcctccgctttgagcttcttgttctttgatggctcctgctccccgtcgtgctcttcattgtcggctgtcttcttgttcttggagggcgcttgctggccaccttcctgctctttgctttctgtcttctgcttcttcggagcagccttcccttcttcttgggaagccgctagtgtgcgtgatcttgtctcgtgtacctgaaaagataataacagttcaaaatgagattcgcacaaacaattggaaagtgattattttgaaaataaccactttccaattgttaaaactggagacgacttggggttgggggtctccctcatgattggaaaaacagatgtcttaactcctaattcctgaaggctaaagctttagtgaagttgattccaacacatatgaatctacttattcagaatcgttgaactagcaactaataaactagttacccaacaaaactactgaatcttagataatctttaccatcaattggcgaacctgattagcaagctgcaagcaaagcacactactaatactcaataatctcagagaaaacaaagagctactactagtctactacaaattgaacactcacaaaggttaagggccaaccaagaaacaatccgtccacacaaacaactgcaaactataagatcaaagctgctatgaataatggattaaaagtttaaagaaaaagatggaggcggcaatgcaaagagcagaggaggcacaagtacaacagcgcagaccatgatgacgcgtgggcgaggaacaggagggagcggcgacgagcatcagggatctcgaaccatctctccacccccctccgcggttaaatataaacgggctggctcgctacgctcggtggcgactggcggagtgggtgtcgccgcggccgcgctccaggtgtttgccctcctccgcctgcctgccgccgcggcgacacgtagcccacccacgcccccatgcggacgcggagacgctggcacgcgcgcgccgctctctcgggctccgcgaaccgtgggggtgggactgggagggagacgcgagacgtgggggtgcggagatgcggtggaaatgaggctcggatgtttggggggcggtggaagcggtcggatgaaatgcggcggcgtgccggcgctcgccgttcgccacgacccgcttctgtactactcctataccgcttcttgtacaactcctatgtgtatattggttggggttttcccaagattcgtgtccgcgttctcgcccgttcgattaggtcggtgagcatttcagccgttggatgagtcaatgagagcactgagggcccttctctcgtgtgacctcgctgtgttttggggatttttgtactcgggaaatataggactttggtacgcaggattgtcaaaatacgggtatagaaaaaaaagtaggaattgactgtttggattcctacgggatttaaaaacacataaaagttttaaaactaccgtttgatagttatacaggaaaaacgtagaaattcaagacacgggaagaagaaaacacgagcggagccatcatttcgcttattcaaacagcatatttgcaaacgaaaagtaatttatgaataaaacttctacatacgtgttcttagtgaactaaaagcaaatgttgaaaaataaacttcaaataaaaacctaaaaatcaactccaaatttaaggttcaaaattcaaattttggttgataagcataagcgaaaagatgagacccgagataagacatcatactaatttccctccaaaattcctctacaatactttattccataggaattttaaagggattggtaggaatcaatcatttatttcaaagggtcttataggattatttttcatagggtataaatcctttggaatttctatgtttttcctttgttttaaagaaggcctaatcaaataaatcgtcgataccatagtgatcttacacgaaattcaaccatgcatccatactgtctattctactctaagaatttccttttttttccatgtgaggttctgtcgacggtgagtacccgtagaccggatatagaaggtattggggtacgctggtacgaggatctacgtaatacgacatcaaggaaacaagagacaaagattatactggttcaggccccttagcgggtaatagccctaatccagttgatatgggattatatggaaagaaccacagattacaaagggagtagtaaaactcagcggtaccgacgagaccatagtcaagttgattcgcctagatcacccggcgacttggctcctgtagtctccgacttcgtaggctatggtcgttgtgtaggctctgagattcgatcccttaagttcccccggggggtcccttttatatcgcaggtcaaacggtctctaagtaggactcggagacaccggaccctgcacgatatagtaacgacccagtcctatacgggtagtaacctttccattggcagactttgtgatggatttccttaacgtgttcagagaatgtccgtatatgcaccgatatactgtattgccatatagcatatatcgaagggtagaggttataccttatccgtaaccctgacagtagtccccgacttcaacttaaatgaactcatgtaaccaatcgcgacttctggtatcggaattgttgtcgttcctgactggtcgatctcggtgtgagggccgtagagacaaagagcattcgacaacaccatgtgaagtccaacggttatgagtgaatttaaattgaagtccaataaaccgcctcgcgtaacggacctagaaatttccggcggccacctctctcctttccttggaattcgcaccgtcggtagtgcgcctatttaagggagttttgagaatacattttagagtccggcgtttgtgagaaacttcctgcctccaaacgttcttcgtcttctccgctcccacacaaaccctaggttcgtgtcacgtcctgataaattcatcccgaaataaaaatcattctctaaaaggaataatagaattaattaaaattcgaaaagaaattggcaaacattaaaatacgtacaagaaaaattcaaatgtggcccggagaatttttgttaaattctccttggtcaaaaaggagccctcaaattttagtggaattttcagagcacaaataataattattaagaaataaacaaagttaaaatgatttttataaaaagaaaaaccctaaaaagtctttttcctcccccctccccctcttgggccggctcggcccatctctttccccctctctcctcctccccgcggcccactcggcctctccccgcgcgcgcgccgctgacgggcgggccacccgccaccctcgctgacgggtggggcccacctgtcatccctgtcctcccgccgctcccgccgcctcgcccgtgccctagcgccgccgccgccgtgaatcccgccgcctcccgccgtccccgcgcgcaataaagtggggggaaatattccccgtgattccctccctctttccccccatttctccctccctctctccctcggattcgtttggaaacccctcccctaacctcgccggcgccattaatggcggccgggtctcccgcgctcgtttccccctcctccggccgctctctctccctcccaacgctatataaacgctccccgtgcctccctccaccgtttccgccactcgccgctctctctctccgccggaatcgagctcgcgccgtcgctctctctctccgccgtcaccgtcgagctccggtccgccgccgtcgtcgcctcggaccttctcccgcctcggcgtcgcctccttcggctccgccgcgtcctcgccgatctcgtccacctctccgtttcggttgccgaccgccggaacgccgccgtccccgtctacccgagccgcgccgccgccttcctccgctccggtcgccgttcccgtcgccgccgtcgacccggggtgagccgtggaccgccgtttcgcttcccccttccctcccctctctcgggcgccgctccgccgcgccggtggtcaccggcggcgaccatcggggcgcgggtgcgccgtctcccgtcggctgtgccggcgtggccgccttcgggcgcgccccgcggctgccatgtggggcccggccgtcagccgcccgcgccctcgggtgcggctgacgcgtgggacccacggcgccgaccggtgtgagccgggtgcacccggtccaccgtggaccgtgaggctgccgcgtgggccccactcctgtggacccggtccgcgcgcccctcccctcggctgacgcaataaatccaattttaaattaaaatttaaatgaagaaattcgcaaatatccatttaaagagcatataaacttcaaatggccataacttggccatttgaactcggaattggaccgttcaagtctctaatttttccttaagaagtcaagaacccatttttgtgctttgttcctgcttgttatatggagtttattagagtaaagccttttcttttccgttggtcgtgtagacgctgcagcttcggaagatccgctcttcgtggaggttgaagccgacgtttgggaaagcgagcaaggcaagtcacatcatccttgagcatattgaatcccagtttataaaattattttgatttaaattaatgcattatcgctttatttaaattcctgcgttatcactgttttatttagccatgcctatttacctttgttatgaccttattattattgctattgctattattaccttgttcaccctagaataaacaaaaccccaactagtggacactctattcatggttccactagtatgaatttaggtagatgcttcgctgtttaattaggcaacattaggtggttttataagtttagacttggggaattctcatatcacttggatactatggaatggttggcttattgtggaattggacatacccctctcttcctctttcaaagcccctaaaacctgtttttcggtggggtttgggtgcatgctagttgtgggaagtagcaccccggccactataaggattaagctcgggcctctgttgcaaagcactaccgtacttccacatgtctagtgggtaaggcttagtttgtggctcagtctggttataaacaaaagtacacggatggaaatggacgaagtcgggggtcgatggacatctctaggacaaatgaaggctacacgagctgcggcccggtagtcgagatgtcatggcacagggccggtgtcctgctgctagggggctcaatcctgcctgcctgtcccgggggttccggccgtaggtggggttgggtcggtactcttgtttatggctaggatgggttgggaactatgtcacgtcttccgtccgtataccgtggtggtatgtggtacgtggttacacgtgaggaagatgtgtcttgtgggtaaagatgtacacctctgatcagagtataatctattcgaatagccgcgccctcggttatgggcaagcctagcaatgtacccaagttagtgttttaattcttaaaattggcttaacaactaaaatatggaatggttggcctgggttggcttgggacgagctgggacccagggtcgggttgccagttcggtctgaatcatcgtaggccttgggttaaggcaggttcgtgcgggttcacgaccttgattaataatactgtgtagctctaggatcgtctttataaaatggctttgggcaactaagtgacttttaaatgctgttttctgcaaaacttaacccctatatcattaccccttttacccccttgcattaatcgtgcattcgccggtgtggcttgctgagtactgtggttgtactcattcttgctctatctttctccccccttcagtaagagaagctttgggagaagaagtcttaggtggagtcttggcttataccccagttgagcgcctgtgaagatggagccgtaggcccgctagtccgctgctgtttatttttgattgtcaggcctgaagtgcctttgtaataatgtaaatataatcgatataataaagatgtgccttttgtatcatgtttgtttggtgtaccccggcatttcctgggacggggattaatacactagcgttcgggaaaaggcaattttctcggtcgcgacaagctggtggcaagttagaagtaaatgacaagcaggtatcagagccatctcgactgtaggataagccaagtggataaaaactaaggacatattttataaataaaactatttgcgaaagttcctctttttctccttcccctaatgctatttgcaaaaggtttacccttttcttccttcttcaaatttcaactagtactagatggtcagctttgcgaagaagaagatgtcgtcagttgtttgccgaagctccggaagactgcaggatccgctagcgaagcgaaggaagtagtgaagccagctgtgaaggagtgaagatcttgggaacccgtcgcagaacctaagccaccctatagggtagtgttgttagtcgtgtgttccttgcttgtgtgtgtagcgcgtggtttgcatcggtgggttgtgatgtaaccatgctaggttgtttgcttaatcaacttgcagaataagtgaaacaaacaacacatcagcaagaagagttagttcctttaaggtcctgtctctagttctggtctattctttcctggcttgtttcctctctcacctcaatccctgtaacagatgtttaacagagaaaaaggaaagaatgtcagcgggtatgcctcaagtaactcaagttttcaactcaatccaccactggcctcaagagagttaaccagggcacacccttggtccattccaagcatgctgcttagttcacagctaccattggttggaagtcaagaccaaaatcagtatgtgtttgatcgagcatttgccacccaggtcaatgagcttccaatgccagaagaggatgtccccttttgtcacgattgtagagaacaaggacactatgccctgaattgtccatgggtattgtcgcgtcccaaaacgactctaaaatacatcctcaaatttgtgcttagaataagtaaaatccatgtgaaagcctccaacaattaaaatgtgcaaagttaaaagtcgaataaggcttggaggatttttgtatatttcctaaaagcctaaaatgcgtaaataaattttagtggaattttcagagcacaaataataattaagaagaaataaacaaagttaaaaaggttttataaaaagaaaaaccctaaaaagtcttttcccccccttccccctcttgggccggctcggcccagctccctccctctctctcctctcccccgcggcccatccggccttcccccgcgcgcgcgccgctgacgggcgggcccgcccgccaccctcgctgacgggtggggcccacccgtcatcccctacctcgcgccgcacccgccgcctcgcccgtgccctagcgccgccgccgccgcggattccgccgcatcccgccgcccccgcgcgcaataaagagggggaaatcactccccgtgattccctctccctttccccccacttttccctctctctccctcggattcgtttggaaacactcccgcaaacttcgccggcgcatcaatggcggccggatcttccgcggccgattccccctcatccggcagttctctccccctcccaacactatttaaacgctccccgtgcctccctccaccgtttccgccactcgccgttctctctccccgtcggaatcgagctcgcgccgtcgttctctctctccccttccagtgcccctcatctcgcaacaaatggcgggggaggtggttctatcttcagatagaagattcggatccagtcttcattgttcttgaggagcaaccagacaagattccatcttggaccgccaaacccgccttgaccccatccctccaatctttcatcgatatcattgatgacctccgagtacgggggttgtcggggtatgaagtcactgccaacttcattggtagacggatccagccgctccaggctcgagcccatccagcctttggctactctgggccggaggacgcgacccgggtttctcctcggggtattttcttgtattttgggttcctctccttttatgcgcattcctcccgacttgttgaaacttggttctcgatctgcaggtctgagcggcgcaaccatggaacaccatgttgcccaggtgatgattagcggtcccacgacgacgagcaacgtccccacccctttttgcgagagggaggcggttgagcgtgaagccgcgatcaacgtgagtgtagtcgacggtcctttccctttcaatacttagaccgcatcgtgacttcatgtcgcgcaggctctccccttgactgacgtcatcgggccgctcgtggaccatcagacggcggcttcgttgaaggaggacgttgcccgggaggcgtccgatgcggctgttgccgctgctgctgcaacgaccagcggcggcaagattccgaagacggggaggaaattttcctccgtgctcggcaaccgctggaagatgcccactccatcggtaagcttcccaggtcattgatttacgtagtcggagaatgtcgccctcatgtcgtgctcggtttacttaggcctcggatgcgtctcccccgcctccgcgacggcagaggctggtgacactcggcgagaagtaagtggacgagatttgaggctcttgacttaatcggattttatcatctcgttgcgatgatcgacgtgaccgtcttttgtagggcgcgggcgaaggtggcgcaagatgggtctggagcaaactccagcgcatctcctgcagtggcctcaactgaggtcgtggtcatgcccaggagccgcaaggtgacgcccagcggcccggccagtgatatcgcggctggtcgaggcctgccagctgccgtcctcacttgggaagagctccaggtcgagatgggatgcatcctcgaggctggtgctcgcggcattagtcacaagatcgcggaggcgagggcggtggcggaggcggcggtgaatgagcgcgccgacaggctgacgcgcgacttggcagaggttcgcaaggacctccagaagatgagggagctggtggccggcaacgagcgacaacggcaagggctcgagcgccatatgtcggagctcgagaacaacttgttggagatccgtggctcgctgcgggtcacctacaccggtctgcaccagctcgccggggagtgtggcgtcaagaccaccatctcggcgaatcccaacgagttctcgctgacgtcttcgcttgcggaactggcgactgcgatggaggcaatcccctccaagcatgcggctaggatcggagaggagacgtccaacgggatctataccggggcgtgccatgtccttgcgtgtgtgaggctggcgcatcctgaactcgatcttcagaagatcctggatcagggggcggctagcgacgcgcgcaaggatgtgatggaagaggtcggtgatctgggggagtctatcctcccgctctttgaagagtagggccgccgcttgtctgtaccccttaaccaatcgcgttatgtaaaacttttcgtcgatttcgattgcttttgtgtgtgcaaccgtcgccttagtcttctttggcattttgattccgggtactttgtctgttgtttgtagagatgttgatgtcgaggatgtccagcagcgcgggcagcctgaattgtctgtagtcgctccagcacttgagctcgagccgtacgtgccgcgggacaacatggaccaggatccgcctgaggagacggacgtggcatcgacttctttaggttggttcttgtcggctccctttcctttacctcgtctgtcttgattagtttgacttaggtgtttgcgtgttgggcggacctcgagagtgtgcttgctgatcgcgaccgtcgcattcagtactggaggacgaagtttgaggtggccgaacttgagagaactatattggaggtgaagagggaccgggctgtggaaatgctccgaggtcgcgaggtatggttcaactcgtacctcaggagttgttgcacaaccatggccgttgtctgcagagagctccgagtaccttgcgggggtcccgaggagtcagcggctggctacatctcgtggctgaacggggcttgtgctcagcttgaaggcatcggcgggcgtatcgacgaggccctgaagcaggaatgtcgttgatcgagccgatacgccggagggcacatgttggcgtgtatacgagatcatcgtccgcagttgcacctcgagttccttcacgaagggttttcccattctcggaggaatcctatggagatagacaacctagcaaagtcgatggctccgctagcggagaaaatcttccaatcaatggactggcgttggccttcctggtagtgcttgtatatctgtgacaaaacatcttaagaaaaatgtaatatattttggaattttttgcgacttgtaaggaatgcttgtgaaatagaagggaaatctatctaactaagctttcttactctggatgtggtgtgcacgagtgtcttctcacttcgcgacttcgatcagtcacttgagttatacactctccctagcccctagccttgtcgtcggaggattcttctcggaagataagactcttggactctcgacttgccttagttgaataagcactgatcctagcccccagccgtgaagttggaaaaatccatttccgattacacggcttggttaatacgcacggcgagaactcttacacgaccagatcttacatagtctttcgtctctgaaggatccgacaaggccttatcagctctgggcgtccccagctgaagttcccttaggttcctcggaggccttgtcaagacggtgtaaagggacatgaggataggtttcagtcgtctgggtaagggataatcgggaaggggcactgtgattgaaatctgttccttgaaacaaactttattgaatttgtaagatgtcttacaagtatggacactattgacttatacatagaatttatgcaactggtcaatgttccaagaatttgctaactcacgaccatcgccgtctgcaatcttgaatgcgcctggccgcaagacttgtgtgatcgtgtacggtccttcccatttgggcgagagtttgtttcgccctgcctggctttgaactcgtcggaggacgtagtcgccgatcgaaagtatgcgtgctcggatgcgcttctcgtgatatcggcggagggcctgttggtagctagctgctcttgcggcgacctgttctcgatattcctcgagtaggttcacgtcatcgtttcgctgttcctcctgatcctcatcggagtgcttctgtactcgtgtactctgatgtcgtaactcggtagggagcatggcctctgagccgtacacgaggaagaagggtgtctccttgttggacgttgtcggtgtggtgcgcatggcccatagtaccgaggggagttcttcgacccacttcttgtcatgtgacatgagcctgccgtagatacgggtcttgatcccttgtagtactatgccgtttgccctttcgacctatccattactctgagggtgagaaaccgaggcgaagcatatcttgactcccagtccgatgcaataatcttgaaaatcggcgctgatgaattaggagccgttatccgttatgatgcggtgaggcaatccatatcggcaaaatatccccttaatgaacttgatggcgttgtcggccttgatttctcccgtgggtgttgcctcgatccatttggtgaatttgtcgatcgccacgaacaggaaactgtagccgccctgtcctcgtgggaatggaccgagtatgtcgagcccccagcatgagaacggccaagtgagagggatggtttgtagtgcttgcgctggtagctttatgtgtttgctgtgaaattgacaagcttcacacctttgtaccatgtcgcaagcgtctttaagggcggttggccagaaaaatccttgtcgaaaggcttttccgaccaatgtacgaccggcggcatgtgacccgcagaccccttcgtgtatgtcgaggaggaggtgcttgctgtcgtcggacgagacgcattttagaagtaccccgttcggtgccttcttatataaatcattgctgatcatacagtagatttttgcttgacgggttattttctcggcttctgcgtcgtcttggggcaactcgtctctgtttatgaatttaatgagtggggtccgccagtcgtccgtggtctcgatgtcgacaacggcgcattctgcctttgtagcccccgggctgatgtcgggggttactgggctatcttcattgtttgcctctttcactgatggttttgtcaggatgtccagaaaggtgccgggttcgagtggttctcgtctagacgcacaccatgctagatcgtccggctcgatgttgtccttgcgatatacgtgtcggacctcgatcccatcaaatcttttttccagcttcctgacttctgcgagatacttggacagctcagggctagagcatttgtaatctttgtgcacctggtttgcgactagttcggagtcccctttcacgatcagtcgcttgaccccaagtatggctgcagctctcatcccagcgagtagtccttcgtactcggctgtgttgttggttgccctgaagttgaggtgaattgcatgcttgaactgatctcctgaaggtgatgtcaagatgaaccccgcacctgctccttggctgttgagcgcgccatcgaacgccattgtccatgtttcgttgtcgatatgactatctgacctgttttcaggcatagtccaatcggctacgaaatcggcgagaacctaagacttgatggttgttcgtggtacaaagtggacgtcaaactggcttagctcgactacccatttcgcaatacggccgacaacgtctttgtttctcacgaccttgccaagaaggaaggcggagacaactgtgaccttgtgggcttggaagtagtggcgtagctttcttgacgtcatgattactgcgtagagcagtttttggatctgtgggtaccttgtctttgcgtcgtgtagagcttcgctgacgtaatagactggtctctgcaccttttctctttcgacaacaatgacagtactcacagagtagggcgtagcagcaatatagaggaacaattcttcattaggttggggagaaacaagtacagggggatttgacaagtagcgcttgagtgcgatgaacgcctcttcggcttcttgtgtccatacaaatttgtcttgcttttttagcagtgcgaagaaaggttgtcctcgttctcccatcctagcgacgaacctacttagcgccgccatgcatccggttagcttctgtacgtccttgagccttgtgggcgacttcatgttcttgattgccttgatcttctcgggatttgcttctattcctctgccagagacgaggaatccgagcagtttgcccgacagtaccccgaacgtgcacttttcagcattgagcatgaggcgatatcgtctgaggttgtcgaaggtttcccgtagatcgtcaatcaatgagtcgcctgtcttggttttgacaacaatgtcatcgacgtaggcctcaacattgttacccaactgatcgctaagtgccccttggaccgtgcactggaaagtgttccctacggttatgagtccaaacggtattttgacgtagcagaatacaccgaacggtgtgatgaatgctgtcttctcctcgtcctcttttgccatgctgatttggtggtagccggagtaagcatcagggaagcttaacagctcacaaccagctgttgagtccaccagttggtctatttgaggaagagggaagtgatccttggggcacgcctagttgaggtcagtgaagtcgacgcacatcctccacttcctgttggccttccacaccatgaatgggttggctagccactctggatggagtacctctctgatgaaaccagccttaagaagtttatcgagctcttctcgtatggcatgtttccgatctggtgcaaatctccgcagtttttgctttactagcttggcatcgggtcgcaccataagtttgtgctcaatcacctccctggggacccccggcatgtcggacggctgccaagcgaatacgtccgcattgtcgcggaggaaggtgatgagcgcgagttcctatttctcgttcagtgatgccccgatcttgaccgtcttgtcggggttggcactagagagtgggacgattttgattgcgccgtctggtttcggcgtcttagtcgttttgatcactttcttgggtggctcggctgtggtgggtgggctgggagtgtgctcgaccatgtcgaggctccgcttgtcgcattggaccgccagctttgcgttcccttggatagtgattgttcccttcggcccgggcatcttaagtacctgatacgcgtagtgagatgtggccatgaacttcgcgagtgccgttcttccaatgatggcgttgtatgctgtgtcgaattcagcaacatcaaatgttatctgctccgttcggaagttgcttgcttggccgaaagtcactgggagcataatcttgcccaatggcttggacgaagattgaggggtgattccatggaagggttaatcagtaggtgtcaactcgcttcgtggaattcccattgcgtccaaagtgctggtgaagagaagattgatggagctgccgccatcgacgaggactcgcgctactttgatattccgaatagtgggttcgaccacgatcggatatcgtcctgctataacagcagccttggggtggtcttcatttgagaactcaatcttctgttcagcccacttcatcttgggttgaagagtacgttgtggaacctccgaagaccccctgccatgtcgaacaaacctcacgctccacttttttgtattctcgctttgaagagtacgttgtggaacctccgaagatgtgcgagacatgaagatcggaatctgggtacgcggagtccgagtcctgagtagttgtctcagttgccttcttgactacacgtactcgcttacccttctccaaagccagctgcctttccaacgattttttgaagatgaggcactcctccagagaatgtctgtccgacttgtgtatggggcaccatattctctttgtatcaccgtcctgtgggtctgggtgtttgggcgggcgctcgtattcagatgcaaggacttctgcttgagctttcctcttcccactcttgccgcttttcttcttgcttgattcgggtgcgtccttggctggcttcttctctcctcccgcctttggtttgtcgtttttgcgtctcagcgcatcgtctgcgtgggcacatcaatcgacaacctcgaacaaccttcgagtagtagtgattcgccttgttgccaactcctgggtagtatagcgatctctgacacctgttttgaaagcgcggatcacagaagcatcggtgatatcggagatcgtatttctgcactcattaaagcgccgaacatagtccctcaaagattcaccctaattctgtgttaacacgtgtaaatcatcttcgatcgcgtggcgcttgtaagttccctagaagttcgcgacgaattgttgccacaaatctgcccatgaagagatcgagtaaggtgggaggtgcatcagccacgaacgcgcagaacctttcaactccgttggcaaatagtttgctaacgcgttgtcgtctgccccaacagcgtatagtaccgtggagtagacttggaggaattcctcagggtcagtacttccatcgtactgctctattgctccgggtcagaatctctcgggccatcggacatcacgtagagaacggttgaaagctctacacccagcgctgggggcagcgggttgttggcgatcgtgtgtcctccgtggacgtttatcggatgacgaagacgaagatgatgatgacgatgacgacgatgactcactcgactccggcgtgcgattccgagggcgacgttcaggttctcgagaaatctgtcatcgtccaccattgttgtcctgacgccggtcaccattatcatcttcttcatgtcgatgccctcgaccatcatcttctggtgtccgctgttcacggttatcgcgatcgcggcggttatgacgatcacggtgatgttggtcctcgttcgagcggcctcctcgctcctcgttctcgcgacgtcgtgaggaaacacgatgtcgggaacaattctcgttgtctcgtgcgcgtcatgcttctcgacggccgttcagatggtcgcggagatcgccggtgccgcgaggtggaggggtagctcgtgcaggctacgtccgctactccggtggttcaccgtcggcaccgccagctgttggtcgttccggttgtgctctggtagtagcttcctcgaatgcgttactgagattggccaccgattcccgtagtcgttccgtccatcgtgcgaggtcatcgttaagcacggggtcatagggtgcttctctcaatattgcattaacggtgccgaaatgttgggctggcgtggccgtctggttctccgcctctgcgttagcctgttcatacgtgctagttccaccgatggcaaacacgtcgcgtggtgtactggaagatgacgagccatagtcttcaagcaagtgaaggactgatggttcgcgggcactactggagaaacgactattaatgaccggaaatttggtcgttaaaagtccaaatgtggtcgttaaaggtcattaacgactacagaagtgtggtcgtcagtggtcgttaaaggctttgtcgttaaaagtattaacgaccgaccgatttttttccagtcgttaattttattaacgacggtgttcttctgccatcgttgttttcattaacgacggtgatatcctgccatcgttaatctcattaacgaccgtgataatatgccatcgtttttcatttttcttttaacgatcgtgcttttccgtcgtcgctatttttattaacgaccgtgaaactataccattgttattttatagactaccgagaaactgtagcctcctaatttttttagtgaccatgataatgcatcatataattattcacgatggcataatgtgttaccattagcaatacatcaataacactcacggatcagtttaaacaaccacaccttgtaatatattgattcccacatttgtctaacagcacaacgaatataacattgagttgtcctgtagcagccacgtgtttactcggtgcaaatacaaaataataatgttcactgcatccaactagataaattattcagacagcaccaacatgatgcctaattaaacaatcactagaacttatggtgaacaaaatttcaatctgaaattggaattgcaatggactattccttcatgttttacgaggaatcaacccttcatcagcaggtaccatcttcatttgcatcatagtcatctctttcactgtggatcctgccatgagcacatatatattagatacgcaagttaatgagtactatatttcacatatcatatatgaaagtcattttaggtgcatgaatttacctctcatgacgtctttgtgagccagtgtcacttctattttcacagttagcataatagtctctcctcatctcagcccattcattctgcatttgatttacagactcaacaacctgactattttcttctcgaagcattttgttttccctctctgttgctcgaagtctagcatgcaattcagctttgctaagtgctgggcctcgtacatctcttgctttgacaccaccaccaaatccaattaaatgatcacgccgcttattaccgttgtaacatttatccataacttcaacattggagagattaggatctgagctaactacatccacaagttctgcctgaaatgaaccaataatagtgttggacaaatgctactgtcaataccaactagaaaccataatgaaactatgcattatctaagaggcgttcacaggatagttattctgcacaaaacctgaatcttacatgcatcctagaagattcaacatccaccaaagtgtctcccttcttgcgagtctcaaagaataactcatccaaagttggtggtctgttttcctttcctccctattcgagcagagaaatgtatatagtagaaaacaagtgtgatttaatgaaaaattatgtacataattcttttatttataccatattgtagattatctctttgaagggtttgcttccagtgcgatgaggcatttttaagcctgctctgttccgagagtttctaaggctcattgcctgtatttagttaacaaacggactcattttgggcaaatataagtcaagtaaaatgcatagaacatactggaaaaagaggggacatcatcacttacaataaaatctttgctataaaaatgctcctggacaagccattgccaatcagatgggtcaaaatcctttggcttattttttgtagcctgctgcatagtttttgccggtttcacaaaatgtcgatgcaaatctccacgccagttaatccaaagagacttggcatgttccattatctcatctttgtatacatcaattttaatatctggatcttcattttcaaacttgtcctgcaaaattataaaaacaaatgattcagtgcaagcatagttttattgaaaacaagagagaacatttcataggaagacagatgcgtactgtaatcgaggcaaatatgtgttcctgctctgtgttactaatgtctgaccatttcttcactttgaccggagtaatgttccgatcacgaacaattctacccagatgacgtgacaaactattcgaaagagcacgattgttgtaaaactcaactttaattttttggttctccttgagtttggcaacttccttacatttgttcttgccatggcccttgtgctgaaccattttagtacctggcaaattagataaacataaaaatatgaactctagatatgaattaaacaaatgatagttgaattatcgtgcataccattttgtaaggtaccattcaaactctgcacctggactcgttcaattacatcttgctcagtatctaacagatatgtcaagaaaacaactattatagtaaatttatttattgaatggaaaaacttgtattgaatgttttaatataccttgttctgtatcttgcaaattaggttgagtagaacgtcttctctttgcagcaaggatactgttatgtgcatcatccgaagcatgggatccattattgctattactaatatctacatgacacaacaaattgatacgaggacaaaataagtaacttaacaatatttcattttgttactagtttactccttgagacgatgcagtcctcacatttgtttttgccacagctactgcgcttaactgattgagaacctaaaacaattgaaaaacaaattatactaagtactttatgtagaaaataaaataaattcttgtcgtaccatcacttggagcacgtgaattagtttgcggacgaagtcttcttttagcagcttgattactattatgtacgccatcctcttcggtggtatcatcatttgcatcgcccatgtctacaatacatgttaatgctgttgatataaaaatatatatggcataagtagagtagatattgagaggggaatattctaacttttggaattgttatattccctagctctccgaagccatgtgtctattgactcttcgtctgaatcatcctcctctcctaagaaaacaagaaattagttttaataagcatactagctagctatttgttcaatattatcagaaaagaagcatattaattctattgttacttggtaaatattatttaattttgaatatacattcatgaaggataattaccaggttgtggcacagcagtgtgtttctggtactttagattgctctgccttacatagacaggcttgctctttccttcttgcacaatagctgtagctgacaccatgttctctggtgacccaaataaatcatcagctgttgaaggtgctgtccgtcttgcaacttgttgctgaagtagtccaggactaatgaacttcgagttgttgttttgtagtgcagacactctatttcttccataccttccagaaatcatcacaacaacctacaaggctacactagtgttaaaataattaacaattgttatctgatagcgatcaaaagataaaataaaatgtttatgttttatcaataaaatttgaaatgataaaaggaaattatcattattatggatcaatataattgtcagataagaacacagaaggactgcgaatgttccatctttatgcaaacaaggaatgtaaggacaagcatcatcatggttttctctttctttttagtgatgctgagggagaatcatctagtatgtcttcttcattgccatcatcttgctcaacttcagtgctttcgtcatctgattctcctgctggtacttggtaagtgtcacgtggttgcattttctcaatcaagtgccaacctttgatctgattgtctttcacaaaaaatacttgagcagcttgactagctaaaacaaatggctcgtctgtttgaagcaaccgctgtaggttaacactagtaagcccatatttatctatccgtattccacggtctttattaaatacatcaacccagttgcagcgaaataacggcaccctccttccacctaagtactgaatctcaagtatttctgtcaaaactccataatattccacatcatcaccaagaaccatcacaccactgttttgtgtacacctgcggctgtcccgtctttctgtgcgatatctgaacccattcatgtcatatccagtaaagcatgttatattcttcagcggaccacgcgacaatgacaaaaggtcttccatgacctcactcttatcatgctggtgctgctgatatatctacagggcaaaaagattaaaaaaaataacatcaacaaatatacatatttgaaacggtttattccatatatgtaattatataaatattaccttctctttaaaccagttgatgaattttttgttccatgttgaggtaaattgtaccattgaagaaccctctgtactgttgcagtactcactgcaacattttaaattagaaattacataagcttgtgaaatgaatcgtaagaaacatgacataaataagtgccatttttatcaagggatacctgatatattcttggacttcatcgcaattccgcagaatataaatatgagcttgttctgattcaagcatatcaagatctcgagttttacgagaaccaatgggccttccagcacaggagaagattgataaattaaatttgttaccaatagatgtgtcatgtattcttcctggacgattgtgttttgtctcgacatcatccaagtacctagagcttaatgtcataaactcatctgcaatgtatccctcagcaattgaaccctctgggcgagccatattctgaactagtgattttaggcagtgaatttgtctctcaaataaatacatccatcgatagatggttggtccaccaattagagcttctctagccaaatgaacaggcaaatgcatcatgacatcaaagaaggatggtggaaattccttttcaagcttacaaagaattattggtatttgagcatccatttcttcaagctgttcaactgacaatgccttcgaatttaatttcttaaagaactgggatagctccacaagtggttcataaatattttcagggagcagtccacgcagagcaagagggagtatacgatttaaaataacatgacagtcatggctcttcaatcctgacattttccgctctttcatattaacgcaacgacttatatttgaagaaaatccatcaggaactttcaattctttaaaaaaactaagcagtgcttttttttttggtctggagataacgtgtaaggcgtaggtggcaaaaccacctttcctccatcatctactggatgcaagtctggcctcaggttcatgagttttaagtcactacgggtattaatattgtccttggtcttccctttgacattcattagtgttccaataatgctatcacatatatttttttctatatgcatcacatcaagattatgacgtagcaatagagttttaaaatatggtaactcaaaaaaaatgctccttttcttccagttatctcccctatcactgcgtgatacttttgtcttcttactcatatcctttgacaatataattccctgtaaatcctgcacttgcttgagcacatcatctccggataactcctttggtggttctcggctctcttttgtaccatcaaaagaagttctgtcatttctccatctgtggcttctgcgaagaaagcgccgatgacccatgtagcaaaacttccgacctttcttaagccacattgaatttgtttctttatgacaaactggacatgccaactttccctttgtgctatggcctgatatatttccataagcagggaagtcatgcactgtccaaagaagagctgtgcacgtagcttgaaatttgtcttggttgatgaatcatatgtgtcaactccatcttcccaaagttctatcagttcctctatcaatggttgcagataaacatcgattgcatccccaggaccatcaggtcctggtagtagcattgacaacattacattttgttgcttcatgcacatccaaggaggcaaattaagaggaacaaggaatacaggccagatggaataggaggttcgcatgttagcaaacggctgaaacctatcgctagcaagacaaagcctcacattccgaggttcagatgcaaatgatgaatggattttatcaaactccttccatgcttttgaatcagcaggatgtcgcataactccatcatcaaccctacactctttgtgccacttagcatatgcggccgttttcctacacataaataacctctgcaatctaggttttataggaaagtaccgcatagttttatgtggaatcttcttcccagctgaagagtgcttaatttcccctgtgtgtttttcttctttccacctagatgatccacataccttgcaggattcagcatctatatcttctttccagtacagcatgcaatcattcttgcaagcatcaatttttatgtaacttagtcctagttcacgaatagttttttttgcttcataataagaatttggcagtgtagagtcatgaggtagaaagtccttgcgcagcaattccaacaatgcggtgaaggacttattactccatttccccaaattcttaacatgaagcaaattaactaaggcagataatttagaggttctggacccttcatacagtggttggttgtatttgtcaagcaaagcatagaacttggccgcatcagtgtttggctcctcttcaggtccctgatcagtagattcatgtgtcgcttcgtctccaccaggggtgttgcactgaggaaataaattttccatcaggtcttgcattccattatatccttccccattaaattcctgtgaatcatactcatcaacttctatgtcattctcttgttctgctaagacttcaccatgatggtaccaaaatgtgtagctcctcagtattccatacgctttcaggtgagaagacactatgtgacgaggcaaagaatatgtattgcagcacttgatgcatgggcaacgtataacctggacaccatctaatttactgaatgcataatctatgaacttctctacaccctctaagtactcgtgatttagccgatcatccacaaggcccatccatgccttgcttggagccatcccctctaattgctagttgatattaagttttatataaccctgtatatataattaatgtcaaagaagagttacaatacactgttaggtaaaatgtcaagactagatagatatcatataaattattatttggcaatatgattaattgcactgcattctgtttttagttgactatagatgaaataattcatacacaaaaaaaagtgacagcccagcgctataaaatatgtttgattcaaaaaacaacaattcagaaatgtctaacaaatgcggacatgcaacagattgattaaggatagaatccaaacatcatggattgattaaggatagaggacaggcaccagattagaaacgacatgatttcaatgcaaagggagaagtagtgacctgtagtagaactttctagggtttgattgaagaagcactcggacgggaaccaccggatcagtagcgcgatgaggccgcgcggcacggtgccgcactggagaagtagaggatcagccgatcggcaccaatgattagcgctccatctgtggttctctcaatctggtgagggaggggatgtgagaggggagaagatattgggtctattatgaatggaggaggagatatgtacatggacatatgcctaaaactcctcctttgagcgccaaaaaaaaataaaaaaggtatgtaatcacccgccataattttttccatgcatctgaaatttttttaaaaagccacaacttattttctttaatgtccctgatgtgaaactgtactaataatttttttagactcatttttttcataatctcacaacacattttctctgttctttttaactcaaaattcatttacaatatatattattttagtacaatatattttattgtgtttattcaaagttttatgcaatatataatggttgtcttcttctattgtaataatcttgttggaacagtcaatcctctaacacctaatggcttcttgaactatgccgatatacccgatggcgttggatcggttatgaccttgtacgaaggagtaaactttgtaactatactcatttttgtcataatcggacaatacattttctctgttctcttttaccttaaaattcatttacaatatacactattttagtacaatatatttcacggcatatattttattgtcttttttgaaagaaatataatggttgttttcttctactataattactagtttgaacggtcgatcctctaacgcctaatgccttgatgaactatgccgaatatacacccgatggtgttggatcggttatgaccttatacgaaagagtacacttttataactagacgacagtgttggattggttgtctaaacctcttaacccaagaacaaagatacgcaggatagcgacaaatccataaactatactaaatttggtgttaacattgtaattaataaaaaatatcttgttcacatagcatgattttggaacatatagtagatgtattttaaaaaaaaacgtatggaaaagaaagtaaaatcattagaaaaacttttgttcaggggactcgaacccagcaccagcacctttctaacttaaggtacaacacaatatccaactgggaaaagctagtttgatgtttattttattgtattgctactttatacatatactaactgaaataaaaggatgaccagaaaatcgaacacatcatgtttagagcagaaaaaaaaggtaagatgcattttctgagctgtaaagcatagctcatgtacaaaaatatttcgatgttatgcttacagatttacaggcttacagcattagcatacccttgaaatacacatagcagtgtacaggctgcacttaaatcatgtacaacttccttgaacaaatcgagcacccttcatctagacctgtacttgaatactttacaactttgttgaacaaatcatattgcactgtacaatggatacaaagtttaaaagggatagaacaaacaaatcattggcagagtcccagtccctgtggtgtctagcataacttaaagttccagttgaagtgaaactttcagactgtatattgtccagcaaagtactatcttactgctgcagagaatgatactataaactgaaacaagaatgcacatagtgaacatagatcaatcaagtcagaccccacaataagacaatatatagtcttcattgaagatactaaagtgatagcagagttacagatgcatgagttattctttgctaacaaataactggccatgaactggatgctgatcgaatttatatattatctatctaactgaatttacttttttcttagagtaaaatacaaagggacataaattttcaaaaattcatctctaatctcttcaagtgatttttcataacgagcttcagcttcttttctttccaaggcatttgcctcatctctagcgaagattaatgcacccttttcatattctgccttcaagtattcatcttcatcactctcttccatggtgtatgttaccaaggagtcttctacaacctgctggtccatgatgtctgctcccacttgctgatccatggtgtcctcaacaactaaagctaaggagtaccaacccatatggtcatcttcattaatctctttctctttcatggtgtcttcaacaacatttgccatcaaattaaccttggagtctctaagtaattcctttggttcatcttcctttacaacttggtacatcttgtcctcgacagcatcacccatagtgtcctcaacaactgaaacaaaggagtagctatggtctttggacccaactgaatccaaggagaagctatggtcttcagacccttcaattgaagtatgtatagagttagctggatgcagaactcaattttaagtaaatagaaataacttgtattgctagcattatagcagaggtgaaaacaagagatgtacaccatttaagtaaagcactgctgatactataattatttcaaattacaattaaaatcaacaaactagtagtaccatcatgaaaaacagtctaggagaagaatatatgtcaaattaggaagaactaatgcacatgtaactataattgttaattgcacagaagtcacacctaatgtttctgtttataaaatataattatgaattcattctatgaataaagctagaacacttgctgttcttgcctacaaacaaacaaattgcctacattcctctattactaaggctgtgtttagatccaaaatttggatccaaacttcagtccttttccatcacatcaacatgtcatacacacacaacttttcagtcacatcatctccaatttcaaccaaaatccaaactttggatccaactaaacacagcctaatgctaatgaaagtgccatagctaccacaaaaataaattgtcaggaccatatcaaacatttcaggttgagggcagcatagaaataatcagtatccacctagcaaactttgcagcttttattagtttcgaagaggacaatacaaccaacactttaacctggcaagatttaacatttaacctagcacataattcaatatgtttcacaaatcatatgcaaatgtttacattaggagattggagaatacctgttgtgactattttcgacgattgatgagtcccaagtgaactggaacaaataacagagtggctgggcagatcaggtggagagatgtactcatggaggagcttggcattaagatgttcagtggtggggaggattgacatttgggagccctgaggagaccatgtaggccattcgatgcagcccctagttgtcacctccggtgataaactgcggctgcgagacatggcggtgaatcaacactcctctcatctctcaacctcatgatttatactgatttggggcgaaatatgtgggggtagcagaggggatctcggatttggaatcaaaaactgttgattcatattgatttggggcgaaatatctttggggaaaagaggggatttcggaattggaagggagcagtggattggaggggatctgatagacttttcctatgccaatgatggggattcttcctcccgctgttccgctacctcctttgtgtggcaaagagcagcaaagagcaaagttatagggagcatgggcagcagctgcaggcttgcagctgtggagcgaatcgaaggcggtggccgaagccgagggcggcggcggcggcagtggccggagagctgaggacacaggtcgctgagtaataacgaccatttgcaattgcccatccaacctgagtaaataacaacaacgaccgcagcccactacgcattagtgaccacaaaaaactagcgtcgtcggataccagaaatcggcccaaagcagtatcaacgaccaagattatgcagccgtcgttagtttttggtcgttgacattcactattctagtagtgggggatcgatgtcgattactccaacgaaacgatccgaagtcaacgtcgctccttgttccttgtctgtctcctcgagagaggttcctgactgttggaccttgggaagcgtcgtcttcatggcgcggagaaagaccttgcagcttgagaagtcgtgattcttcgtcttgtgaataggacaatagacatcacgagttagagaagtacgcaggattccacgctctttgcaagcacagatttcagcttgtacgttgagaaaaacccagcaaacttgcaagttgtgcttcctggacttgtggataggacaccaggacttggtgacctcggaagttgtcctcgtcggctcgcagtccttgtcggaaggacaaggctcggctgtgctaggaatcttctcgggctcgtatgacgttgatgtttcgttctccgccctggcaggaggatccttcgacatgggaccgtccgggtttatagccacggcgttctcatttccggttattgatggaccagccgagattggcaccgtggtgtaaaccgggaagacgatttcatcgacttgagtccacaccagcattgttgaagcagggattccttggatggggccggtgttgactctattgtcgacgaagctcgatgtcatagtagtagaaccttgagcaccaagtgcccctacctggcgcgccactatcgacggtgagtacccgtagaccggatatagagggtattggggtacgttggtacgaggatctacgtaatacgacatcaaggaaacaagagacaaagattatactggttcaggccccttagcgggtaatagccctaatccagttgatatgggattatatggaaagaaccacagattacaaagggagtagtagaactcggcggtaccgatgagaccgtagtcaagttgattcgactagatcacccggcgacttggctcctgtagtctccgacttcgtaggctatggtcgttgtgtaggctctaagattcgatcccttaagttccctcggggggtcccttttataacgcaggtcaaacggtctccaagtaggactcggagacaccggaccctgcacgatatagtaacgacccagtcctatacgtgtagtaacctttccattagcagacttcgtgatggatttccttatcgtgttcagagaatgtccgtatatgcaccgatatactgtattgccgtatagcatacatccaagggtagagggtataccttatccgtaaccctgacaggttcttcaaagaattttgagtaaattttacaaaactacatatactttaatcaaattatcacaagactttagatttaaggtgatgtatcacaaaagtacatatttaacactaaatttatcacaaaactacatatttaaggtggagtatcgcaaaactacagatgtagtaacaaaattatcacaaaagtacagattttagagtttaaatccttagcactagtgttatatttgagttataaacatgcaagttttgtgattaaattgtcactaaacctgtatttttgtgataatactattattaaatttgtagttttacggttctccatcttaagtatgtagttatgtgagaaatttagtgttcaatctattgttctatgatatatcacactaaatctatagtttttggataatttgatcaaaattctgtagttttgtgaaatttacccaagaatttcctgcagactccgcagaaagtgcacatatctattacagtatatcattaaaacatacttgaaaccagatatcaagtccattatgaaggattatatcaaagaaaaaaattccagcatgaatgcatttagaaatagttataatccagaataaaaaaaatattaaaagaaaagtccacacagaacacaattggagattaattaaaattagaaataaaaaataaaataaattctaaaattagaaaaaaaaaataaagataagagttcaagttggaatacagtttataaataactaaaactagtaataaaaaataaagaaaaaaataaagaatattgaaagaagagaccatctaaaacacaacatgagattaattaaattttaaaataaaaaataaaataatttacgaaaatagaaaaataagtataagagttaaagtaggaattcaatttatagatgacaaaatatcgaaatgaaaaatatggaatttcaataaaaatatggtccatctaaaatataaagatgacaaatgataataaagaggggggaaataagagggctgtaaagaagtaggatgatggtaggtgatgggactaagggggtgtttgggagagaggggctaaagttcccttttagcccctctctcccaaacaccccctaaacaaattgtctggcattaagtgaaaattggaatatccttggtgtattgtgtaaatttttatgagtatttgtaaattcgaggcctcatatcctttgattgacatgtgggctctttgaccccgcatgtcctttcttccctccaaaggataggaagttggtggtaggggtggtcacagactcgccactcaccaccaccgctactttttttaaaggagtatagatagatgtcttaacatgtggcctgcttaaggatttaaagacttgctttagataaagcccaatcaaattgcactataattgtgtggtaatactatctttgcttataaatacacaacattattgactttattaaaataaactatgtaaatgtgatttattttgttgcgatttgtttcatcgttaaagatactttatgatgaatgatcaaactcatgtataaaagttaacaaggttgtatattttaaaacagtgggattactattagaatttggtaactactcaaaatttgaaagtgcccaacctattcaatgaaaaaaaatagcaatatgtaaaatttgacattgtactaggtcttaaactaaataggatcacaaagttatgttattcaactcaaaatttgttttcaagttgatataaaccgtatacacagattgagatcttttgtattagcacttgcttaaggcagagttggcattagccccaagggctctttgatagaaggaaaatcgtagtaatttcgaagggttgccatccttaggaaaaaaaatctataagggcatgttcaatggtagagacgagtatggtgtcttaaacaagattatttaagattatttatagaccgtatgtttacaatagttgatacgacaaaggctttaatgattaacttaaaaaatattccttctattaatattctttccatttttttacactcatgcaaccatatttttatattatagtgattaagagccgttgttatgcataacaatgatgtttttctctctttctttttcttccatgtcaacaagtatttctaattagcaccgctaagagaccactattgataaccattgtacatgccctaacaacatttgcaacaaaggaattgcaatagcatctcacgaactgcaattcctacgcattcgttatgcagtaaatttagcataagctcacacatcatatttcattttgttttgtttagtccaatgcacactccatttgatttcctccagattcctgtgaaccataaacatccagcgtccctttagaatcttgtagtattgtgtagcatatgactatatttctacggttttcctattcgtgcgttttaaattttttttgaatgtcttaaaaatcatatcgtccaaagatacttagggtgtgttctaaagttgttttgaaacagattattagccacacacaaaacgagaaatagatttattgagtgttaattattaaaaacttgaaaaacgagtttagcaacttctatatagaaagttttgtacaaaatgcaccgtttaacagtttgaaaaatgtgctaataaaaatcaaagaagtgccctagccgaaatgtagtttagaacatggcttaagccctctatccctttgtgagtatgattatgaatttgtgaccaccgcccctttctagtgttttgtgtatgttaggaggcacgcttctgagtatgcatatggtaaatgtgtatagcgttatgtgtatttatgtatcttctatgtaaaaaataaaacttatataagactcaacatgaaaaagaagtgcatttgggggctctgcatgattgagaaaacagagaaatagaaaatgcatagaattttgacatgcagacaagcgcaaacagaggtttgtaacacatagtaaaaatacaggaaatatcgtttggttggaccatatgaaaaacataggatttggatgagaaagatatattcataggaaactatttatgaagttgaacatcatattaaaaattatccaaaacttgtattaattgaggtatcccttactcccccgtttcaggttatatgaaaaaaaaactttggtcaaagccaaactgcttcaagtctgactaagtttatagacaaatatagtaatatttacattaccaaaatagctttattagattaataattaaacatatttttataataaatttatcttgggtcgaaagttttactatttttttgtcaaacttgaagcagtttgattttgatcaaaattaaaacatcttataacctaaaacggagggagtagaaattttataggatttagtaatttttaattctttgttttaacggaaatgctataccacgggatactgtcccaagtgcgtgggacggtatcgcctcctcccgcactatctccttgagccatgtcttctccacgtgcgtcactgctactgatggtgtgcctcatattgttgttactctgctccggtgagagctgttgctgatgcatgactcctgttgctgctgttgctttgctccggcaagatgatgaggagcgttgacgacgcctggcggggcgagacggcaagacaatgagtatgtgcacggcgagtcggcggcaagacgacatgatgatggcttcatggtcgtggtcgttgcctgctcgtcgctaccgcctgtgaccgcgccgatgcgaacgcttgatgatgtgggggtgtggacggtggaggacgcggcctcagcgatgagctccggtgtggggcatggacagtggaggacgcggccgctggcgatgagcccggcgtggggcgtggcggaggaggacacggccgctggcgacgagctctgacgtggaacatggatggcggaggatgtggccgtgccggtgacgatctccggcgtggaccgtggatgatgccgccgccggtgacaagctccgacgtgagacgtgaacggtgggatcaccggcgacgatgcttttggtgcctggctcctgatactttgcaagtatcacctaatacatggtaggaatcgccagatatctgacatgtttcacttgatacttcgcaagtatcatctgatacgtggtagaaatcgcttgatacttgacatgtttcacctgatacttcgctagtatcacctgatacgtggtaggaatcgcctgatacctgatagatttcacctgatacttcgcaagtatcatctgatacgtgctaggaatcgcctgatacctaacagatttcacctgatactttgcaagtatcacatgatacgtggtaggaatcacctgataccttataggtatcacctgatacctcagaagtatcgtctgataaaggttaggtatcatgacatgatacgtcagagatattaggacctaatacctaaccggtatcatcctgtcccaacgggattccattgtatagcagccccttgttttaaagggctatatatgagaaaaattgaaaaatctatactattggaatccctacgttttttttttcatgaaatcaaatggggcctcagattagtggtggggcgcagggtgatgcaccaaacggcagaggatccgactccaagcgtccgggatctaggaatctagccgtgtgccactactggatttttcacattttggtccttttaaaaaacttatttcgcaaatagacccctgaaaaaacttattccagaaatggtcctttttggggcgccagagtggctggcgccgtcatccaatgggacggcgccagcctctctggcgccgtcctcctgccaccgtggcgcacgcgaaccgacgtggcaggaggagggcggcgctagcatggcgccgccccagggaggagggcgccagcatggctggcgccgccgcctccattcctgtttctctgtatggagttgcaacggtgtcatttttattttattttttcggatgttttttcacactcaggatcacgatacaaccaaccacaaaaaaaatttaaactcgaactaccacttagctaagtctgaaaatatctagcataccacttagtctactttgcactttcactaaaattagaccataactcttttaataaaaccctttgatcaaaacataatgcactctaccactatatgaaattacttaatctaattcaaaatataaccacatgaaatgacatatataagttaaacagtacatagagatgcaatttttttatttttatttcattttttgatatttttttcacacttaggagaacataggaaccaaccgtataaaaaataaactcaaacggataaaatatgtgacatgtagaattttccaaaactctaccaaaatggacaaaatatgtcatctattaaaataggcataactttctcatacggactcagaatcaggcaaataatatatgcacggacatctacagaaaaagttacatccgattctccccggcctcgccgggttcggcgatactaaaacctccaaattccgcttgcaagattgtgttttcgaggagagaagtttttcggtggagctttggaaaattccatatgccacatatttcgtccgtttgagtttattttttacatggtcggttcctgtgagttcctaagtgtgaaaaaaatatcaaaaaaataaaataaaaattaaaaagttgcacatctctctcctctgcactagttcggagagaggagaggagagaaaaaattctacatgtcacatattacgttcatttgagttcaatttttctatggttggttcttgtgtgtccctaagcgtgaaaaaaatatcaaacaaataaaacaaaaataaaaaatttcggggggggggggggcgccagccactctggcgcactccccctagccacctcagcatcgccccgccacgtcggcagggggacggcgccaaagaggctggcgccgtcctgttgaacaacggcgccagccactctggcgccccaaaaaggaccatttttaggataagtttttctaggggtctacttgcgaaataagttttttaaaaggaccaaaatgtgaaaaatccagtgtgccactatgccggctctctcgcatccctccccacctgagtgagctccaccacacacacgccagtcgccgccggcttttgcttcctccgcctccgcctcgcgatggtaaccacccaccacctctgcctcctccggtcgaccgtcctctccgttcccgtccgcctccgtgcaccccgggctccccctcacccccgcctgcccaccgcctccgcctccgcctcctcctatcatgggccaacgcacctccgccgcctgcggccactgcgcgccgccgccgccgccgccggaggagcctcgccggtaacgccctcccccccgaaccgaggaacacccctcctcgcccccgtaaacttcgttcccttccagctgctgaccgagagtggcccccctctcgctcctccaggatggcgctgatggggccaagcgccccgcgcccgcggcggcgtcttcctcgctgggagccgcgctggtcggcttcgcgcgtagcaacttcctcccgctaggtgagttttctgcttctacgcgatctcagctagctcgtgcattgctgctgctgttgggtggacttgtgtgtgggacgcagtgtgccttacaggtagatgtagagttgcgaaatttcacggcctaacatggaacaattgaaattccaattctcataaattgtaatgcaataggagtattacctccagctagtttacttgttaatgaccctgatatttcattagacaagagaaatgctagggtagacgggtccagttaccaaattcaacaagtttctgtgaacccaattatgcactagttagttcctctgcacgtgctttttagttgctctatgttgcaaacttgcaatggagatgataccgtagatgtgtctgtgcatccctcagacaagctcaagtacatattttcttagcttgtgtgtttcttatgttaagctctaattgctgggattgctctggccctcatggatcctacactcggatgccttgctcacaaatattcactgtcaaagtacagcaccttcgggatattccttatctcaggttagtgttttaacccaattcatatatttgtggtgctatgacctcacactaatgacgtcctcttgcataggactgactctgcgaaccaaggaacttggtgcagcactagaagcttggcctgcagggctttttggacttgtatgatccagtttttgttccattacaattgtacctgtatgatctagtactattctgatctgtaaatgtatctatgctgagaatagttcttgcttgctgcattgtgatccagccatccaggatagggttgcatatcacattcatgctactgattattcaatttactttctagcatttaattatttagctgaggtcacatgctgcctgtctgatttttgttagagattcaagttcttatgttgttatcgagtgcctaaatatgtttgcttaaatatttattggtacatattttcattcttttgcaggcctcaatcttgctgtttacaccctttttggctcagtttattatgcaaattaagttcttccctcatgaatttatcactggtatgttggctctcattgtgttccccatttccctgttcctattatattatttattgttgcaatgtagtaactcatgccttcatgttatttatagcttgtttgctttgatattgacaacacatctcacagggttggctatgttttgttgcatgccaacaacattatcaagtggagtcaccttaactcaggtactaacttttcctagatttctattcactaatagcttataatgtgcatattttctcatatagccaggcattcaaatttaatcaagttctatcactgctatgcagcttgttggtggtaacactgctcttgctctcgcaatgacggctatatcaaacttactgggcattatgattgtaagcaaagctttgttgctagtttgtcttctgaaccacttaccagcattacttataactaacaacttataaacacattatcgaactaccgacttaattttgttgattcattgcaacacaatgttttgtttgatgccattaaaagtaatatatattttttagtattgaaaataacattagagaagcaagttatttttctcctgagctgaactgattatgggaggaaaatattattttagataaaaatagaaattatcttgatcagagatggttacttgattgcaatccatcatccctgtagaaccttgaagatatctataacattgcctgggccgtaggctaaaatccagcattgactatgaaacaaattatctttgagacttccaagtagcattgaacctcctaattctggcattaatcttcgtatgtattttcagataatgagcattgagcaatcaacttattgtttttagataataatcaaggatgactttttccctgttttccaaaagccaaaactcctatttctttgtaaaatatgttcatatttatttgtgaccatggaattaggtacctctttctcttgcaaagtacattggtgttggagctggggtgtctttgcccacagagaaactatttaaaagtctggttacaacccttcttatccccattattttaggaaaggtatgttgcttttcttatcttgcaaaagatagctaatatgaatgcataattatgtgcctgtcttctttctggattttatagttttctgatgaaataatacctggacttgttctgcaccatatctatgcaactaccttacattataagcaggttttttgatgaacattcaattgtttaggcccaatgtgttctagatctactgtcagcccttgtttggtaggctgcgattctgctcccttccctggcctatccacgtggatgggctgggattgaggtctgtctgaataaggttttggcaggattacattattagccaccacctgtttgagtagaatttacagtagagcttcctaaaaagacacaatagagttccttgttcatttatttcatgacagtaaatagcaggaaagctcataggttttaactgaaccgctctctgtttgaatgcattgtcattagtttccatccaactctgaatattgagtgtactccctatcaatgtccatccatagagagttgcagttctaactctttgttaattacttcattctcattattatgcttcagacctatgcattttttttttactgtccaagtttgaaatgatggaagcttactgaaggcacttatgatgtcttttgtttgtcaggttgctcgagaaacatcaaaaggtatgcaatctactttctttcggaagaaagttttgactgtagattaccagtttgttgaattttagttcttattattgatttatttccatgtaggtattgctggctttgttgatggaaataagcagggcttttcagttacaagtgctattcttctcagcttagtatgtctctaacatagaaaaatatttcgtttaatacatttcttgcatgcatttgttgaatttaaaaaatattaggttataataaaggtgatgcttacttggaccaagagagaaaaaaaaggttcaatatggtttcctgtttcaagcatgtgttggataagtttatgtatgaactctcgactaattgaaagagggtggacagtggacaagctagggagttattagtattgtagctgctttggcatcaaattttcaaatgtctattactttggagaaagagaaatgtacacatgtcatgaatactataaattattttcatgggttatctccaaaaattttgctcacccagattatgtataaatgatttgaaatatgaaacagggctcatggacaaaggaaatttctttgtatttgtagcaatttgaaaagagggaacatatagtaagttcaaggtagtgagaaatagcaatgaatatgcaacctgaaaaaaaatccactaaatcaggacacgtcaattgatgaaaataatccactaaatcaagacatgtcaattgatgaactgaaaaaaaaaatctcaaataagatgttatctacaattctaatgaactggtagatgctctttagtacggtttggaaaggactgtatcttattttgaacttgataggcaatacttttcaaagagcgagaggaccctaacagacaacatttcaactagagcagaactgagcggttttgggcatgatctgttagcatgctttttcgttgttcctcctaagcttacattgcctttttagttaggtggtgttcttttctgattaagatacagattttacctcgatttctgttagcacgcttttcaaacggctaaagagtgtgtttcatgcgaaaactttctatatagaagttgctttaaaatatcatataaatccatttttcaagtttgtaataattaaatcgtaattaatcatgagctaatggctttcttgttttgcgtgccctaacttcatcttcattagaaaagaacaccaccttagtgacgaatcaatttcaattttatgcatgcacaatgtttgtaggacgcattttgaaatgccttcgtttcgcaggtcccatggatacaagtaagcagatcaagatcactgctcttatctgttcaaccaaaagcctttgctgttgctgtcactgttggagtgtacgtttatttcgtaatcttgtcatagcaaatcttgatatactgatatggaatttaaaaacaaaataatattttaatgtgattttgttttgctgtttactgtatgaacttgtatccttgacatcatgttttcatgatagcatattttgtattattattacttgtgtcctcaaaggcatgcatggaaaagttattctaatttgtagaattttgacataaaagtcatatactcatatgttggtgttatcacttatcattgttaggtaaaaagtgtgacgctattacatttattttcttgctaacagtgttagtttgggtttagcacgagataatttctgtcgtgctaaactgctaagcatggctaagacttaggcttgattagaagataggatccagacactcttaagtagactaaattttttgctaccagtgctatatttttttcttccttgaatatacttctgctgtgtatattatttgacagaagcatatttcctgtaataggcttttgcactttgctctgttggctttcaatgctgcagcattgcatatcttgtcacgtcttgaacaaagaggagtgtctgtctttgcaaggaatgagtatgctcgagctgtcattttagtggccagtcaggtcagtctttattttgattagcagaaaattatatttttgatatgttgcctcttgctgggggttaggatttaggaaactaccattgctggctagagcattggtatcccaggtacttaaggaaatgcaattttaaattcttttatgttggctttcttggctgatgagtgcacacatatgattatcctaagtttcacattcttttgtcgagtgaatatacaaggtaaaaagacaacttacaaggtaggtgtatcttggccatagaaccgataactgctcactttagtcaccaatattgtttaagcacattcaaggtcaaatcatactgtcgcaatggaatgcacacacatggcgctgattggggatgccatgttggactgttatgaaccttattttgcaagataacatctacatgctagtgtcttttaaaattttctcaaatatgcatgtacattggttgcttattttgctaatgtggatgcataatcagtgtcatgtggtcattttgacatgatatgcatcacctaaaacaagattagttatgcagattagtctatgagctacatgcagtctcctcataagtcgttttcgtgtgttgctattacattcttttttcatgacactgatattgttatatatgttttaggcccttgagttaactgacttctttcttgatgctctgtagaaaacattgccagtgctggttgccgtggttgagcagcttggaggtgctctcggagaatcagggttgctggtaatcccatgtgttgctgcacatattaaccaggtacttgttgctgatgtagttttgatgtctctctatttctatcaggaaatgcttttgatggataaatccttttgcagattattatcgactctatcatagtaaattggtggcgccaaagagatcaacaatttgctaatgcaaaataaattcaaaatgggtaaaacaaaaaaaataagtagcaagtaacatagaatcgtttggcaacgatgccctttgagtttaccgcatattagttttttatgattccgtaggaaacaacaatgaaactatttttgtgtagaaagttcattgagttgcttccatggagcactttctgttatgcatcaatcatactccatctagtcataaatatgcaatgtttaggacaatattctatcaaacttttaaatttcgccatcaatttcatattggaatatgtttatgatattatggtggtacttcttgagacaaatctatgtgtgtgtgtgtgtatatatatatatatatatatgtttatatatgttttaaaactaagtatttgagaaattattgatggtcaaaattttaaagtttgatcgaatcttgtcataaatgtcaaatatgtataattagagggagtattccattttctatcactcggtagttttggttgatagaataaaaaggataatgtaaattctacgcatgctattcttaatgcattttagaacggtaaataaaaaattgtaaatttcattgttgttacacaaattgttgggtgggtgtaatatagtgtacgaacttgtaaaatattcgttataggcatgaaatcgtctgatgtatgctaaccaaggccaaaaggatactatatggctaatcttgttttagatgttgataaggatactacgtaaacacatctcagaaggttgctctttagacatacatttgtctaataaaaagatataatgaggcatagtgattgtagagaaaaatatagtgttacaaaatgaaattcattatatatagcatattttatatatactcactacatgcgtgtatgtcatagttctaatcaacatcaacttgataaaattaaccatgccaagctattttggtccgaactagataatgatcgtgcaccaaaacaaacattgtacaagtttacgtactaaattgcattcacctaataaatttaaaatcgtatcttctattgcaaacatgatattgtgatccattgagattattacacaggctgacattctttgaaactaattctaccatcaaatgtatacagatatatagaaccatgtgtttgagaaaccttccgtgcacaccgtcattgataaggtagagtctatttgtggcgctcaaattctcacggaagtccctttttatcttaaatcacaaaaccggttatttgtcttcttaaatcacaaaaccggttatttgtcactctaaacttcctaaacaagaggcaagctacatattatacaagaggcaaactatgtaagaaaccacaatggcttttctttacaccttgctgattgctaacctggcattgctctacatatcagggcctgtttggttcgcgaaaagaaaatttttgggtgtcacatcggatgtttgaccggatgttggaagggctttttagacacgaatgaaaaaactaattttataactcgccgggaaaccgcgagacgaattttttgagcctaattaatccgttattagcacatgtgggttactgtagcacttatggctgatcatgggctaattagactcaaaagattcatctcgcgatttcctccctaactgtgcaattagtttttttttatttatctatatttgatgcttcatgtatgtgtttaaagattcgatgtgatgttttttggaaaaaattttggggaactaaacagggccttatacacttattcctaccccatttttctcctcccctcctttctactgaggtggaaaatgtttggcacacggagccaatgtcatattagtagctaaaatagaataaaatgctgccgtcacaattgatgtgacaaaagctaccactaaaggtagtcatagggtgaaacttgtccggtttttaaatgtttggggtgaaaaataacttttttaaaggttagggtgaaaattggattaaagtgaaagtttgagacccaaaataaacttgacccttgttcacataattgattggggtcaccccatgataaacaactaggtgataccccgttctttgctgcgggattcatggatgagtatatgttaaatattatcgaaatgataaaagttgaaatgttcaaaaaataatgtgaggaagatgatttgacacgtactggttgatctctataatataatattatagatgatgtgtcatgcttgcatgggttttaaatatgctataataataattgttagtgagtgaagatatgtcatgcttgcatgggattttaaatgggctagaatagtaattgctagtggtgatgatgtgacatgcttgcatgttgagctttagcttctaataattgttaatgcataccaactatatagtactccctccgtccaaaaaaagacaaactctgagtttccgtgtccaacgtttgactgtccgtcttatatgaattttttttataattagtattttcattgttgttagatgatagatgataaaacatgattaatactttatgtgtgacttgcctttttaattttttcataattttttcaaataagatggatggtcaaacgttggacacggaaatccaagatttgtcttttttttgggacgaaggtagtacttgttgatctctataatataatattatagatgatgtgttatgcttgcatgggttttaaatatgctagaataataattgctagtaagtgaagatgtgtcatgtttgcatgggattttaaatgtgatagaatagtaattgctagtgggtgatgatgtggcatgcttgcatgttgagctttagcttctaataattattagtgggcaccaactatatagaaagtatagattatttcctttgccacaaaatacacaatgaaaataaaaatcttatctctatgaaatgcttttgacaaaagcaattatatatattttgaacaaaagtataatcccgtggaagtgtttccaaaatattatggattgttattgttttagcaagactagggtggtcatgttaattctgagaaagcaagtaactacaactaagatccatctacggttttcattaccaatcataaatttatcttctaatcattttaatcaatttaattttttatcactaaaacaatggggaggtactatacctctcgaagaacagaagtatatcttaataaataaacaaccaataaatctaaatgtaaaactattagaattgaaggggggaaagagcaaatctacttgaaactcttataataccatgaagtgtcctttcaaaagaaaataccatgaagtgcattttatgtggcatttacccacgtttattttttttttcatactaccagcggtgaggtagccaacaccaaattgtatggaataaatggggctataaaattttattagcaaaacaatcatacaaagcatcaggagatctggtgattctggtcatgtcttcgtacctaccccagtaaggaagaattcgggaactggtacgtcagagcagtggataaggaagaactagtgttgagcggcattgcagttagaggaaaaatgaaattgactggctaggaggcgacagagattggggagaaaacatgcatggtaggagaaattggaggtagaagaaacactattagccatttttttttactcaaagaccgtgggggaagcccccacggttaaattatattaaagaagaaaaataagaagtacacaaaaaaacaaaagaagaaagctaagattacagattgtcaatccatgattgaaccgtgggtctataaacttctttgaacctaattaaatgtaggctcaaatcctccttcaaacccttcatccaattgtgaactgatggctgaataccttgaaaaataaggccatttctttcattccatatattctaggttgccagtagaaatagttccataaaactatgctgagaaaagaaatttctttgaacctgcaacatttgatggaattctaatgaagagttccaaacctagcccaactttctccaacatgacttgctgaactcacattgaaagaagagatgttcccttgtttctcttgcattaaccccacacgtcaagcaataagcagtggcattcaaaggaatacaatgtttcctgtcaagaagctccttggtattcactctatccatcaacagcagccacccaaagactttgattttcatgttgagcttactttgccagatccaattaaatgaacaagggggagataaggaccaaaaggagagcttataaaatcgttgatgagcatttaagtataatcgtgtaagttctacaactaataccgtacaattccacaattgttggtcaaagccttccactatcctcatccacataactatgaagaaaatataaaatcatttttgataaaatggattgtcatctcacctatcacattagaaatgccagatggcagggaaggaatatgggaattgcggatcacacgacactggccaaatcagtactctcttcataaccaatgtatccccttacgacacttaaaggccaccaagaaatccatagaagtgcttgacaaatagagaaagcgttttctatgagcaggacagaaaacatatcagaaaaaatatgcaaggttaattaaatgagaacgtgtctaccaactacacacggtggactaggggtgttaaacctggagaaatttgcaaggatgttataagtgatcaggaggctatggcatgaatgaatgcacagacatgggttgaattggacaccgcatgtgaaggtcctgatatacttctatccgcagcagccacaacaataataatagaagatggggccattgccaacttgtaagatttagcttggatgcatggcacgtgtccaaaggatgttgcaccaagagtatatgcattcttcagaagaaaaaaatagagccttgaagtaggccagtaaacacaacacatagatacaagatctcaacctcttacctaatgggggtatgaccattgtgctcttggactaattgatcaccttatgaagcacaataaaagaagtgcacgtaccttgctgccgacaaacatgatggaatcacttggaagctcacacaagccatggggagtataaggcgggatccgcttacaaagcatcgtttttggctctatcaacacgaactacgagatgattatctgaaagccctaagcatcgaagaaatgcaagatcttcacttggctaatcgtgcagaatagagtgtgaacatctaaaaaactagatacatgcggttagtcaaacaatacctattgcttgctttgttggcataccttggtgatgtccttccatcttctaacgggacaaagatacacaaagagaacatggatctcgcttgagcagatcaaactgataatgtggagcatagctttgacagtccatgagtggtggaaggcgttagctgctaacacgggtctaccaaagaaaaggtgtttgcatcatcattttacttacaacacgtgaaatctgaaaggggagaaactaaagagtatcccaacataagaaatgtttagcaatagcgcgacgaagatcgaggatgccaaaatctatgccctaccaagtaaaaatgattctttgatcttgtcctcttaaatttatttttttttctcgtacatttctttttgttaattgtgcaggtcagtttacaatggctacatttaatgaaattggcaaactatagaaaccggtttattaaagaaaacattattcaaggtttacaccctaccggatgaataatttactactctctccgtttcagattgtaaaactttctagcatttcttatattcatttagaagttaatgaatctagacacatatacatctatatgaatgtggacaaaagtcttacattgtgaaatgtagcaagtagtatttatcatcctcctaaaatacacaagcccaaattcccaaaatgcacgtggccgtaacaccatttaccacccacgtgctcctacaagaatcgcatggagccatggacctactgtctactggcttggtttcatccagaaccatgggctcttggcagacaacccggccttctcacagtgttttgattggtacacctgggtacgagcccctgtgctgagctgacgatgaactgtttcgcgtgtcgctgtactgggagtattgggtgggtcagtgggtgggtgtgaggaatggacaactggacaggcgatgcggactgaccggtccgtggcccgtgggggcgcgggtgccgcgacatggacgcgtcggtgccctgtttccagtgaccctgtaggaggagaaaaagaagggctcgccgctgcccgctgtaccacgatcgcgtatcgacacatgggcttgcactgcattgcacacacatgatcatccccgtcacctccagcttgtaccggccgtgtatgtggctgccattgccatatcctcatcacatccagctggtgcctgccctgccctgccagaccctttttctgtgccatggaattctgttcgtgaacacaacagtgaatcaccaagatcgagaccgaggcggacgaggccgcgcaggcacaaatgacaagccgcctctgctccaggagagcacggcgccggcgcgcacaggggcaggacacggcgagggcccggcgcgcgggggtcgacacgtccgcgccgcgggggagagcagagggcgtcaaatccgtgtgtgagtgcgcgcgcgccgtagcggcgcttgtctgtcgtctgtctcggcgatcggtcggtctctcgcggcgcgccggcatgcaacgtcttttctacgacctgtggggtttttggtacgcgcgacgcgctatcatcgccatgtgcgggtacatgtgccgcctggactgggaggcgaccggccggcctggccggcacagtgcggtgtacgcttggcataatggaacgtatagtggtagctgccgtctttggctaagctcgtaagagtgctgtttggccacgactctctctttagtttctctgtcacttaatttagttgattttttttaaaactcatatattttgttgattatagatataactaggtacatatcacacatgagttatttacctgtaaatataagtaattttttaaaaaaaaccctcgaagatagtcaaattaacataaactcctaaaattcgctaggaagagcttgtaagaaactagaaaaaaactgtgatgacggtgatccaccaaaagaaacacacgacttgctaggaagtgatcattctcttctttaccacgttgcaagttagatccacgctgatgacggtgacaaagaaacaaaaagtggttgtagatgaaaatgttaggaagcatacccaaaagagacctccgcttggaggttgaggcttatatggcaaaacgatgaaaactcagcttctcccttaagatccaccactggtggcgaaggaggcttgcattcttatggttgcctcacctaagatgaatatgacggccggtggaatctcctaagaagaagcaaacctatcttacttctaagggagcgtccatggtaaagccagagaccattccatggatgaatttgactggaatcaatagaaagccatgggaataaaaaaaagcgatgttgatgaactcttgcactacataaaagcaccaaaagaaaagcgaaaaaatcctactacctaatccccttcccttcgctggcaaccaaagccgttggaatcgatggaggaaaagggtcgggcaaagaggaacgaaggagcccattttagggcccctttgaattggaggaaaaaaatataaattttggaggatttcaatcctatagtaaaatttcaagcctttgaaacaaatgattgaatcatatccaatcctttggaattcctatagaatggacaatcctataaagattttggaggaaatttagcaaaagcttcaacctcttggtaactttcctttgagtctatctctctcatccaattcctgtgttttttctgcggttcaatcaaacggtcattcttgtgtttttcctgtgttttgcaatcatctgttttacacttacattcatgtctaaattctacatttttcctattcctacgctttcttaatcctgcgaatcaaggagcccttagactgtgctttgctagcttgcttctggttggtccaagtcaggtgctctccaggcaacccaccatatataaccggatactctatccgatcataaatatttaatttttatgacaaatataaacttctaaaagtttgaccacttatttctataagcatctaaattgattatttgtgggtcaaccagaaattgtttcttttttatggaaggtgtaaatttataaaatgtaaaaagcctataataatgttacgatagtacttttcaggttaatccatatgttctttttttaaagttctaacggtttaataaaattttattctaaacgtcggcaattgcttatgaacagagggggcatacagttacatgaagatactggttgtcgaaaaagtacacccgagcaggtactttatgtacatcatagctacgtgtacacgtacttgaacttgcggatacccggacatgtacatgtatatatgtaaggccagtagcagtgcaaggcacgcttgacgtgcctccagcccatttaagcaaggattttggcccaaaattcatctctaggttacgcaccccataccacagtgctggtgacccaatcttgtgaccccacgccttaaaaaaatctcgtgaccttcctcatccttatccccacgacgaaggaggcggcgcggtagcctcgagatggcgacgcagcggcccacgcgacggcggcggcggctcggctgacgacggtaacctcggcagttgcctcgtcgtcctccgcggatctggagcagtggtgcggcgtcctcaggctcgtctccggccggcacgacgtccacggctatcttgagcggcgcgacgtcctcggactcgtctccggccagcatggtggcctcggcggcagaggtcctcgaggcggcggcttcctcgaggccgagcggcggcggcggcgtccttggcactccctccgccgacggcagaagcagcagcaacaacaacagcctccctgagcccacgcggcggcggcggctcggccaacgacggcaacctcggcggtggcctcctcctcacttcaagatcgcgttgatctttctcgtcaccgccgtcgcatttctcttcatcccgtcctctagcttctccccttcctcaccggagccggataggattgaggattccagcacgggagcaagatgccgagcgagggaacgacctccacaacgcaaggaacggcagcacgcgccctcgttttcgacgagataacttgtcgcccagatagggggcgagcaaccaaacagagctccatgctctagtgttacgcacgcacaaatccgagctggcgacgcgaggttccgcgccacgtcccgcactgtgagaggcctaagtacattgttgctggctacagtgaatttgatccgaaaggtttgtgtgtcctgataggttgcaggacatccacaattagacgatgacgacatcaaaagcatgatgtttgaaacagagcccattaattctgtcatattttcagtatatgtactaaaagcacagagtcatgaaatttatatattttgccgatttcaaattacatttttggtttcagaattccagtttcaaaatgggaaactgggttccaacttttacttctggatgatttcatttcacccaaaaccgttttatctccattttaagggaccccaaattaaaacctactacgacctcctcctgttttaatagacgacaccattattttgagatatgcatttgatcattcgttttataaaaaatacataattattattttaatatgttgtaacttggtttcagatactttaagcatgacttatattcttacatatttgcagcaaaattttaaaaagacaatgattaaaagatcggacggagtgtttttgttggtttatcggtcgtacaatataatttgggactctaaaatccatgatctagtacacgaagttctggaattgagctctactaatatacaatatacaagcttgtttgaaagtgtgtggacaagacggggacgtaggggtgaactattgacaagaacccagcaaccagctagcggagcccggccacttcggtggtgtttgaatctccttacataaagataaagatgaagattaagttttttaagcaaaacgatgtggtattaacgtatgattgtttgagttttaattattacaaacttgaaaaatagattaatatgatattttagagcaacttttatatataaagttttcgcacgaaacgtaccatttaacagtttgaaaagcgtgccacgaaaatcttaatcttcatctaacttttgttgatgaaaagaacgggccgaatcttcccttttcttgcaggtaaccagctgattttaattttgctacagtttttgtagccatatctagctcttcgtattactcgagagaacaaaaatgtcttcacacattgatacatacagagaatatttgatcaagatctactccccaattcattttttactccatcttcatgatgtccaattattatctactttctccgagttgataatacttatcgttttgaataaggacacgatctctaaaaaaaaaagttttgaccattattttttattataatatgtataaaagtgttaacaaatacatgattttattaatgtattttttaagactaatctatacatatagtcaccatatttgaaagacaaatattttaaaaataatttataatcaaagattctaaagtttgaccttatacctttgtctaaaacgacaagtattatccgctcgaaggaagtatactactcatccacaggaaaaaaaaagagagccaaaccatcgatattaaaacgatcgaaatgacagggaaaaggaggtcaagaatctacgctgcctctgaatgtttccagctccatacatttacacaccagcttaccgttgaagctcacagccgatacgttcggcgagaacaatgccggcctaatcgcccaagattattagatacatgcatcatgcatgcatacatatataaacagatatatatatatccatgtcatgtcaccaaaaagtgagataaagggatacagaaaaagtgacaccgatcggattacaaaaacaagtggcaagaagtagtgatcacaggatcaaacaaagtacactgcaagcaccagcgaattgaatcgaagaacagcagttgaatagtaggtaggcatatatgcaggggggatgctaggactctcctgccatggatggccattgcttcaactagtgtagctagctagagatctctcactgctgctagtcaaccatagcttgcacattgcgattgcgattgctcactcacaatcctatgatcaccttgattaattcacaaatcaactaggataatctgataatgtgcatgcaaacaagcacgaactggtagtctgtaggcctgccctgtagctacgagctagctagctcacacacacgagcaaagctagctagctgcagctaatcacagtgtgccttatttgacagtgaaattaatgtaggggaaataggaaaactaatagaaaatgccagtagaagtagtagtaattaattaagctcgattatattgttttgtccatgcaagatcggtcgtcgcggtgtcagggtcgtcgtcgtcgtcgccgtcgtcggtagccattagcggcggcgagcggcggtctcgcgctgcgcgttgaagtagacggcggcgacggggaggccgaggtcgttgtcctcggcgaactggcgggtgctgaagcggtccctcgacggcggcgggctcaccgcctgccggcgcttctgccggaacagcaccaggatgaacctgtggatgccgatgtttggccgcgggctctcgtagctcaccacctccctccctgcatcaccattgatcacacacaaaattaattatagagagatcagagaaagctataacctagataagacaaataaatattgttttgattaattagtacatattttttttaaaaaaaaaatagttactacattaccagtttaccacaaattaattgaccttgtattgtggctaattgttcactctggatctctctgatcagtcaattctcatcaaggttcaaaactggcaaagactaaagcaggatgtacaggggaaaggcttaccaaaagaggcatcagtagtcccaggaatatcagtaacaatcctgcagcaaggtggtccaatcaaaaggtcacctgattagctacacatactctatagaatgcattgattgaaaattaatctggaaaaacaatgattaacagcatgcatgacagaatctttgcaagcaatcaatcatggcgtgaccagtgaccacctatacaaatttgtctggctatgtaggtgacacttgtacctaataatgtctaatcaacttgaataagaccgagcaatattaacttgtacaggtagtagtataaattaccagtgaagatgctccctcaggtatggatcactaggccctggcacatcagggtcagtcatcacctgaattaagcacacaagtacaaaggatcaattagcacataatggacacatacatattacagtatagatgtgcgatagtctgatgaatccagcagcagatgagacaggcatacgcaccaatgtgaagaaggacctgaggtcgccgccctggacctcgacgcgcggcttgccggcgacggcggaggggaagaactcgtggccgttgaacacctgcttgttggcgccgtaggtggccgtcatcttcaccgtggggttgaagttgtccagcacctcgccgatcaccttccccacaatgagaggctccagcaccctcgacatggccgtatatctatctcaagattatctcacctgaattgattcgatggtcagtggctgaactagtgaactaataactgatgagctgctaagtgtagtatacactcttgtactgctctctcagctctctctctgaatatatgatgtggctaggtgcaggcaattcagttcaggatggtgaagagagcaaggcgcaggggcgatatttatagatgccaagaggcgagaagagcctatctgttcttgtcctgtcctggctggctatattctgatcgtgcaagctgagtgtgatggatcatagattacacatattttcgaataggagagtagtatcggataaaaagctcaggggcatgtctatcacaccagagatcacattagcatgtcaaattgtttaatccttgcggtcattttctttcaggagttttgattatagtattgaggcacttgcggcgtaaaagttcctaactggatgtatcctaaagatatttattctgtgaagaagatacagaggggcaatggagttacaattatttgtgcatagattctctcacatttgtcaaaagaagaaaaggcccttgccatccatacgccaacagtttccaagttgacaatgagcaccctctctgtgaaatctatgtacttttgttttgcttcatgtacatgtcataatccatccatgtaagaaaagggtagctaagcattatccttaacgttaacttcataaacatgctaatgtagtaatgttcatctctacaggtacactaagctctccttcggaacaaatgaaaaggtggaggaaatttggacgattgaaattaatcctatgaaaataattcctatatgatcatttggatcaaaggaatggctcttccaaatcataagataataacacttcatcccactccgtttttctcaatttttcgatatttgttttgctcctcacacgcatgacacgtgtaggcttaggtgtgaaaactcctcgtaacatactccctccgtttcaaaatgtttgacaccgttgactttttagtacgtatttgaccattcgtcttattcaaaaagtttaagtaattatttattcttttcatatcatttgattcattgttaaacatacttttatatacacgtatagttttacatatttcacaaatttttttgaataagacgaatggtcaaacatgtgctaaaaagtcaacggtgtcaaacattttgaaatggagggagtacatacgaaccggcaataggctgcctctcagtcatttcactgtataccaatggcatagtgttgcattgtgtccggtagcttttaccgtaggcagcctgttctggcgtgcatgtaagtcacttacaccgtccttcacgttttccataaaaaccttaatactctgacaaatattgaaacaatctattaactgctcttgccttgttataaattttgtggaaaaccccttatacttccaacaaatataatatgaagaagagaaaatctcgtttttagggatgacgctgttatactaagtttctttaaaaatcctacagaatgggccatttcataggaatttgtagaaaaaaaccaacatgagctaagacctcatggtttctcttgtttgagtcatagaattcctatattttttcctatgctgttaccaaacaacatattttgctaattactttggatttcttccttgtaggattcaacaatacgtgacatttgattcctgtttttttcaaatcctccgttctaaaatagccctaattagacacttcctaggagcgcacatgtttaaaaaaatctgaccattgattagatggattgcattatcgtaacagtagcatagactaatttaatagttataaaattcataaataataaatatgatatgtgccaatcttagtatcacaatttggtcttttattaatttaattctaaaattcaaaactaataattaacatgttgtaactgatatggacacttctttttaatataagcaacttataatttcaaaggtaactaaaaattattagaattttatatttatatagtatcagtaataatagtccattaacttacgggttgatgactaatgtatttaaatcgattagattatggaaaatagctcaatgttcagcactttactatggaatcatcatatccaggacgtgcactctgttttgtcttgaaaaaaccttcaaggattaatctgtggtgttgattgtacaaacccatgcacatgtcagagatggcagcttgattatgctaattaagtggttgcttcttttcttttgcccctccttttaaaaaggagcatatatacaatgtcaatgtaaattctccatgtccacgctatccttttacttgcttgtacattactttgtattaaactatgtataaatgtatattttctttatatcattctttgcagctggagtgatcaagcttggacattctcaaagctgcacagcacagctccacccacaagcatccatttttctcttgaggtaaaaaaggcagagcatgatgaatcatcttgctgttatgggctatgaattgcaaaaggccatgccctgaacggcattgcactagcaaggagttgccactccaggtgattattccttcctgcatccgcagctgctcagcttgggtgcaggaggcggccataaactaagctcaagtggttgaaggaggccttcctccactacttcacaaagtggccctgtgccaatgtgttctctctctgcctgcagcagcaacaaacaaacacttctttccagggaaaaggagatcctcaattatgagctcttcattaggcaaaggttagtgctcttatttccataaatggtggagccacctccaagtacatccatgttctttgcacatcgcaatttagtatagtcatctcatctccctgctgcatgtagcagctactcgtgcttgcatgctgtgtgctaagctaactggagccacactggtaaactacaattgcctaattaacattcaaatcgaagcaaagaagtttaacccgcattctctgccactgggaaacgtcaaattacgttatggatgaattatgatgttctgtatgtgttctctttacagtttacatggatgtattgctcagccaactgttgtctgagtaactttaattatattttactctggaatagtactccctcgtttttaaatacatgacaatattgacttggatataactcttgatcatttattctattcaaaaatttagtgcatacatatatataaaagtataagtcacgcttaaaatacctttaataaaacaagtaatgataaaaatagatcatatttacatagtttttctaataagatgaactatcaaacgttttttctaaaagtcaacatcatatatttaaaagcagagttagtacgtaacaaaaaaagagtagggcacaacctttcttttattggctatggtttcaagtgtgaggcactgcagccacaaattccacttatttgagggcatgttcggaatgatgtgaattagctgtgatatatttgaattgatagggaaatcgcacatgagttaggtataatttgcctatccaaacaaagccttgaagggggcaaggtgccaaggtacttgtgatacttttactgtggtctctgttgttattattttactacctgtattatttttttgacatgattactacctgtattattatcagtataaataatctaaaccattaatttatgagttctactaccaatagaaaaaaaaaatctagttgagatggtagttcacatatatttggtctactagatgagaaaatgaaatttctaggttgattttactacgagtagagaccaccacaaaaagtataggtataatatatatacccaattgaaaattttagttattaattgcaatataaaaagaaataaaacttcaaagaaattttaattgcatccaaagaattgtagtttgaacttctagtaaattcctttttatattgcaattaagaactaaaattttcaattgggaatgtatattgtaccgacaatttttacggtggtctcttgtagtaaaatcaatctagaacttccattttctccttttacatatttttttatttgtcctgagtcctgacagatctaattaatttcttacatccatggtgaaagaatttgaatctatagcagcatgcattgatcttatagattaatgcgagaattttgctttttaccatatagatgttcctagaggaatcttcaattaattatatagttagagttggtcaatgtacaatcttccaacactaaattatatagaggctggtgtaacgtgtgtaagctagctagcttatgatgattcatggccatagatcactgaatccaaaaaaaaaaaagaaaaagaagaagcgaattttaggaaatgatctaatatcaaacaaatagaagtggtgtgacttcgaacccaagccaactgacctaccaccttgtggagctagccagaagacctctactgaatcctaatcctactgtgtcatttggactttggagtttgccagtgcaaaaagaagtgtacagatcagtagatagctacttcagtaatcagtgtaccatcacttggtgcgaaaaatggaaaagacttgtttcttataaggactagatccgcattaaacgctgctttacagacaaccattcaggatgttgaaaaatcacacaccctacatactctggaagatgtaccaggtgaaggtacaaaatgccaaatgctttatcatttctgggcacatgacatctttgccgaatgttctcttcttctcaaatgcaaaagcaaatggaaaaagggtaagctgatttccatgggggaaattatgcttaatgctttcctcaaagcagagcgccatattgtcaatttgtcatcggctgatgagcttaacagccgaaaggacaagcatcagtggcaaatttaattatatatcattttgtggcaacatgtcagtttgcagattcttctcccttcagaatggacgataagaagaatttatttttcaaaagataatggatgagaagatgcgaagaacatatttatcattcttcatcaccagaagtgagcaggggataaaaagctatgttgctatatttcatctgcattggagtgttgaggtcagtaatttccctcaaatggtgaacaattttctgaaacatttttgagggcatatattttcagccgaagatggtacttaatatgaaaacattgtcatgattaatatttgtgataaatatttggttttgcaaatgatttattcaatgacttgatttgaaaagatatgcggatgttggtgtgagtgtgtgtgactaatatggatcatgttataaacttataatatctatgctcagaaacggatgttttatctgattgtatctaggatttaggatatgggtgttccgactaaaaaaaaagaaaatctaaacatcgtaaatctaactatactaatatatacaatacaagtatagataataaaatagatcaaaagtgtaccaagatatatcgataaggtatcttaaacatatagaattagtaattaagtaaaattttgacttagaaaagcttatatggcttaaaaagtttaaagaagattaccatacttcttcttactattgggtctacaccttataatgacctgaaagtgttcatcatatcatcttcatccacttcaacgaaaaatatcccgctcaatgaaactatacaatcatcaaaagatcatcacacatctttcttcatgtttcaataatcaacaatttacaatatattactacaatttaatatcagaatacacaagagttaaaacttaaaattgaaaattaaaaaagctacgcaagtagaagacctagaagttgaagccgaccgccgatcaacaatgccacgccgtccaccgcgccgagccgccgatcgctgatctctggtggttggagaactctgaagcggcatcgacaactcgatgtcgagtgccactcggttgctgactgcttgacttgatgaggcccagagacagtgtcagtgagacgacgatgatcgacgtacgagaggagacgccggtcgcgccatcgtggttgctgtcgccgaggcgaggagacggagaaacggagagtcgccgaatcatcaaggcagctagcggcgccgctgcggcggtcagcccaaagtcagtgagacgacaacgatcgagacgagaggagtcgtcgatcggtcgcggtcgccgagtcggagagacgggaaacggagagtcgtcggcgccgagtcaccgaggtgggcggcggttggagctctcgaagtcgcggggggtctcgatcgcggagtcaaggcatcaagcggtcgcggttctccgtcctcggctgcagtcggctcctctcctcgcggccgacgcggcggacttgctgttgtgaatgcgggcggcgggttgaaaaacgagaagccgagcgagaggggcgcgcgcgcaacgtttcggtttccaattccaggcgtgtttgtgtgcaccatgcgatcagttttttttcaccaaaaaagtccgattatagtatggttggttgccattctagcttttgcgtgatccgggcatcactctgcaggtctgaggtcagtgttattcaatggtaaggatcgggaccatactcgaaaggagcagaggtctggtatggttgggataccatgtgagaaagtgactagagttaggattgttcaatgtcaacttcgatcaatagtggaatcgggactatactcatagagaagttgaggtatagactatcaatgataccatgtgatcatagaaaaggagtaagcttatacttgtgggagcctctgtaatatgttgggctctgtggttgagcaggaatgatttggtttttgacaaatcaccatatattacatatatgcagttaattttcagggcaacatattgactccggtgttgggctcagctacaaaggtgtgatgaagatggcgagtttacaaaggttgcatgccataggcttgagacgacagttatgcaactttttgccaattatagttggagattcacaaatagacttcaataatgtgttctccttatcttagatgggtaattttttattttaagtgtgtgttctcaatgttttgttgaactacactcttttttagtgcaactttgtaataattggttgtagctcgttttgagcaaaagccgggatattctattctattatctaaaaaaatcaatgataccatgcgataaagttggatactacttccttcgtttcacaatttaagtcattctagcacttcccacattcatattgatgtaatgaatctagacatacatcaatatgaatgtggaaaatgctagaatgacttagattcattaacatcaatatgaatgtgggaaatgctataatgacttacattgtgaaacaaagggagtatatggcacacactagatgaataccgtgtagaaagattttcgcaacaggtttcacgaggtgtacatatatgtgcaagtgtcggtgttcatgaaagaaattgatggagaatctggaggagtattttgactgctacactccatggtgcatattatatatatggcattgattcatgcatggtgaaacggagggtgcatgcttctgtgtggaattttttcttattttttcattaaaatatttttaaaaaaactccgtttcaaaaatttacaaatctagacgtcttacgcctctaaaaaggtgttttttaaaggcgtccttctagagagcattaagggacctaaatgtaaagtttttatttgtattcaaacccttatcgttggttttaattgtataaaaattattaatgcttattcgacactcaaatgattttaaatggaaaagtaataagctacaaagttgtaggtctcatcgagatctataacttttatatagagttcatctccatccgatgttgtttacaatgtggatctaagatttatgttaaaatatgttttagattatctaacgaatatttggacatcaaaacaatcttaaatgaaaaagttcttgtatatctccttgatctctaccattttaacataaagtttgatttcattcaaatttatatgatatatttttaaattgcaaaatcattgagttaataagctatactggaaattttatacgctactgcggaaaccctttttactcccggttgggaacccccggtaatcccgatttttcaactggggctacgaatccgagattaaacatgcccatctttacttccaggtgaaataaccgggagtaaagttgaatctttagtcccggttggtgttaccaacgggactaaagatagggtaggagcagtcctggttggtccttttttctttctttttttcattgtttctttgctaattgacagtgttaatccctgtattttctctcaaatcgagtgcctgcatatcctcgaatcaaactccaaatccccaaatcaaagtaacatcccaaatcattcacatcacaaatcctaagttacttatacacacaaatcaaatacatcacaaatcctaaaaaaatacacacaaattaaatacatctcagatccatgcaatgaatcacaaattctaaaaatagaaattatacatctcaacatgaatcacaaattatcaaaaacaaaaaagaaaggacgctgccgcccgccacgaccgccacgtgtcccgtgcgcggccccgccggccactggccgcctacccgccgccgccgcggggcgcggccctgccggcctgccgccgcttgccacgcccgtgcgcggccccgccggccgctggccgttggccgcctgcccgccgccgccaaccgccggatgggaggggaggagaggggaggagatgagaggggaggaggaggaaggggatctgagaggaggagaggggatgagatcgatgcaatcttatcttaaatatctcgttgaggaggaaaatcttgtatggaacttaacggatcagagatgggagagaaatatttactctcggttggtaactccaaccgagactaatttttactcctggttggtagtaccaaccgggactcgagtggtaatctttagtcctggttggtagtatcaaccaggactaaagatcctcggccacagacctgtaacaggggatgaatcgggactaaagatcatcttttttaatcgggactaaaaacaatctttagttctggttcttattagaaccaagaataagaaccaggattattataaaaatcagtcgacccagtaaagatcatttatccagtagtgatatttgtgccccttagcgtgctttggaaaaaacaccctctagaaaagaataatcctttgtgtgttggtcgaattggttggcttggaagccaagccgagcaggcctacacggcacatggcaggagcggcagaggcagaagaccgactcggacgcgagatttgcagccacgtcgtttgactgattcaggaaaaacgaaacggtatatttctctatctatactacttaaaaaaataagaaaaaaaaataaaatgtgctttcatcatccgtcaaaaaaccgaacgaaaaaaataagatctgtccgtaaaaaaaccgggtggaaaaaagaagaaaaccaaacctgtccgataaaaaagggaaaaaacaaaaaaccgggcgaaaaaatcaaatctatccgatcaaaaaaaactgggtgaaaaaaaacctaaacctgtccaatccaaaaaagaaaaaaaaacggatctatccattaaagaaaaacgaatccgactccgggtaaaaagaaggacgaaaaaaataaaaaaaaatatgtccgattctctatctctaaactaaaaaatccaactctagatccaattcccccttaaaaacgaaaaataaaagcccctctcctataggcttgagtccgagataccaagcaccactccgctcggtttaatctataccgtgatatcccatatatcttggtgaaaaaaattgatgtgccggattggagatctgtttacaacaacggaacctacatgtcgagagcattctatttttatatgattttaagttttgggtatgtacttttgcatttgagtccctataatctttatatttatatttaagtctctataatcttgcaataaggtatttaaggtcgttttttaaaaaaaataaaagggagataacaaagaaaaaaggtgcataaaaataaaaggaaaagtcgcaaaaaaataaaagaaaaaagaaaaacaacaacaacaacaacaaaaatctgtttcccctaagtggaaaaaaaaccatagattcgaaccaaaaaaaatcctattcctataaaaggcaaacaaaatgtggtgaaaaaaagctagatccaatttctttaaaaacggaaaaaaaaagtctgattcctataaaggcgaaaaaaaactgaaaaaaaacatctaaaaaagttcgtccgattccctaagaaagtggcaaaaaatggttcgtaaaaaataaaaagctggttcgtatgaattaaaaaatgcacgcgagaaaaaaaaatagaatgggtgaaacaaagtctgatttaaaaaaatcagactaactatttaaaaagagaaaatgtatgagaaaataaaaatggttcaaaaaatgcgtgagaaaaaagttagaaaaaagcgcaaaaaaacaccctaaaaaacgtgcacgaaaagttatttccatcgtcggtaaaaaattttaaaaaaaacatgcgaggaacaaactgccagaaaatcatgccatttctaaaaaatggtttgagaaaacctcgcaagaaaaaaaacaccgtctattaaaaaacaaatcgctctgaaaaaactattagaaaaacgctaaattgatggacgcttgagtcagaaagaatccatcattttttttgccatctactacacggcttttatttcgtcatatattctcctgtattggaaaaaaagcaaaaaagaacattcgaaaatacaagcaaaaaaacacgcgagaaaataattatctgaaaaaataggcaaaaaacacgcgagaaaaaaagcaaaaaagggggagaaaaatatggttttcgtcgtcagtaaaaaaagcaaaaaaaacatgctaagaaaaaatattagaaagaaatgcgccatttctaaaaaatggtttgagaaaatcgcgaacaccgtttataaaaaaaacaaaccgctcattaaaatacaaaaattgtcattgaaatcattatgcatgaaaaacgtatattatcattacaatttttttcacccgttgcaacacacgggcatttttgctagtataaataaaaaatagtttgtgaattaaacttttacatacgagttcttaacgatctaaaagcaaaggctaaaaaataaactacgataaaaaaaatcccaaaatcaacttcgaatttaagatcgaaaattcaaattttggatgaaagtataggcataagcgaaaagatgaggttgttggtatggagatgaatacatgttgatggagaattcgtgcacgtcaacagaagatgggatcagatttggtatattgtaatttgatttaggaatttagggatagattcctattggaaatagaagttctacttctactcttgagtaagaggtttttatataaatagagcgagaggctatgccttgagggtaagctaagtttgagagattagagagttgataacactttgtattagggtttcatgagaaacttatgagaggagtgttgttattgcactttgtaaaaataaatagatgcataaagttcaatatactttcaagagttttttttatttgggtttgcttgggtccgatagtcaggccgatgacaccactacggttagatcggtggagatggtcggaggaggcgacgcaaaaagcggacaaaccggcgcaagacgatttccatcgaattcgagtgtaacttttaattctgctaaaagtttggtttttggcgttctaaccattcacatttctctgattggtttagttcttgttgttcgacagttaagatcagtttatgtttcagataaggaaagactgcataagagaaaaggatagaattttgtaatgcactcatctgtgatgagacctccctggtggcctagtctccaaccttccttgtggttgtagttcattcttctttagatgtttagctgttttgccatcataagctcatcgatccagtgttttgtttttgaagatatatttgtgggagacatattatactgccttaatatgatgttgttgatttttaatatatgattgaccatttacattatttaaaaattagtagataattattatttattctattgtgtttcattattaagatgaactggaaatggcgtttgtttagttggatagagtcagccaatgggaacccctgtatcctcaagtcttctcccttagcaaccgcgcttaataggcggagttaaaaaagataaaatgcatgaaccctaaaactatatgtatacataaaagtatatttaataataaatcaaatgatagaaaaagaattaacaattacttaaattttttgaataagacgaacggtcaaacatttttaaaaaaagtcaactgcgtcaaatattttgggatggagggagtagttgaaacttcgtggcatctaacgttaacgcattaccacgagatatatggacaaatatatattaaatgttgtagatatgatgaatggattagaattcaaatattataaaaatgatataagaatgatgatttagcatgtctgtacgttgagctttagaatgtaataaaatgtagatataattactatgcttttttgttgacctttaaataatcgagtgtttattggattaatgtggcatgttcgtatgttaggctttacggtgtactaataattattatactcgatgtttgtatgtttagttttagtgctttgtgagttgtaactatataaaagaagtatgaatatattaccatgttcccttttcctttgttccggggcaacgctccggtgttctctacttttagtattatactaccagtagaattaaacttaaccgtttattttaaagggtagattagtaatctagtaatggtaatttcggtaggggctgatttatctgtattggtcggacgcaggcatcacatcaggtccgaccgtccgacgcaggcaccacatctcgcccaatgcacgaccactgattgcgactcctcaagtagcccctttaggatccacagaaacgtgagaacaagaacgccgcattgaccgagaacttaacctgcacaagcataaactaaacacatcaagaccagatcacacacaacacaaacaaggatccgctcatttcgaacaaagatgaaacagggagcaaacagaaggttgaacggacccgctcagcagggacggaaagcggcagcatggacctggcggcgcggcgcgcgcgacgggagaccttcctgaacaccgagtgcaggaaccggaccaggaggtccaggctgcggtcctcgtctccgtcgtcgtcctcctcctcccctgtgtcatcgttgtcctctttgctgccgttccagtaggacgcggcggcgcccgagagcgcgagagggcgagaggttcccgaccgtctgagtttgagagtgaaaatgacaaaaatacctctccgcatatatttttttttgacaaaaatatccctccacaattctactatcatcaagtgtggtagtagtagaaatatatttaaaccgttcgatcaaatacgatcaatgattcagattattctctactacaagtagagagcaccagagtaggactctttgttccgtgctataaagatcttcacaagggttatggtttggtgatcaaacccaaattgtagagtacatcggacgattggttaacacaataacatgtctaggacgatatatttttcttgtgttttgtctgaccagtcatagctcgtgtggtataccaagatgggatctaatagtcatagctaggactgtcaaaaaagctcgaggctcgcgagcagctcgagcttggctcatcctaggctcgattcgagctcggctcgagctttaaacgagccgaacccgagcctgagcaaaagctcgcgagctttaccgagccgagctcgagcttctaccgagcctggccgagcttgactatgtatagtttatattgcatgttcaccttattaatataataaactaatagataaatatgtatattagtatctatttacacaataaattaccatgtgttagcgcaatatatttattttaatcattttctactcttttattagtgtgattaactagaaaataactatacttatcaaaagattatcattaaaatatatattatactatttatggccgagctcgaacgagcttgcctaaaagctcgaagatgagataggctcggctcgagctcggctcgagcttgtgtcgagctcgagcttgtgtagacgagctcgctcgagctcggctcgttgatagccctagtcatagcccgtgtggtatatcaagacggaatctcagatctggcgaacgtagcttactttttttttcttctcttatatttttctcccgcttaatcagtttttcttatacacctatttttgtacggttcttttatacattagattagcatgggaaatgaatgggaatgattcagcttttaagatagtggtggtcagtttttattggtacaccggttacgtagaattgcgtagaattggggtgagaaggaaagtaggattaaggcccttctaggtttataaccatcttatgagtcaaaaagctaggtctaaacaaataagttttttttgtcttttttaaagctataaaagccacttttacaccgttaagtcaaaagttaggttagataagttttatttggcttatttgaaaatgaaggtatgactctaccattagacttaatgctttaaagccatcggctttaatacatataaaccaaaaatttagcttaaaatctaaggcaacaaatctaagcccaaataaagagcccataagacagtagaaaaatatattcggttaggaataagttcatccaaggtcccttaatttgtcaacgaattcgattttcatcatttaaccacaaaaccagatacaacgggtccctcaactatcaaaaccggtgcaatataagtgccatggcggtttggagggtggttttagcttacgtggcgcctacgtggctaaattgacccggtcttcatctgacgtggcatagatatggcattgacatggcaatttgatttggaaattaataaaaagagtgaccccacatgttagctacaccaaaagaattaattaaaaatagtggggtccacgttggctccacttttcattcactcccctcatcttcttcctcctctctctccccatctcccctctcctctctccaggagccggcggttcagcgacgcggctggccggtgacggcggagccagggatgacctcggagacgaggacaccagggagctgcgcctgtacggggacgctgacggtgattgttgttactggactcacgcctccgtcgcatggcttcgcttcgcttgcctcctgccatgtttttaccatgccttcttcgtcagtgagatcctctctatatgtgccgttcctttgtagtgatctcgtcagagttggtgttgttgttgttgagctcaccgtggtaggagctgagagggggagagggagagatggggcggccgccgtgctgcgacaaggcaaacgtgaagaaggggccatggacggcggaggaggacgcacgccaagctgctagcgtacacctccacccatggcaccggaaactggacctccgttcctcagcgagcaggtcgtgaaaatcaacgatatcgccattgttgctaatgggatcgagcttgaggtgcatttgatcatatcagatcagatcaaaatatggtgtttttgtttatctcttcttttgctctttcggtgatgcggcgtcaagggaggttcggcggccagcgacgccgcggcgaccccccgtccgacctcctcgccagcgtcgagtcggtcgcctccgccacctcccgcagcatccacgtctccaagttctccgtcggcttccccgacgacgacccggactccgacttctcgcccgacgacccagacctcctgcgcaaccgccccgtccccgaccggctactcgtcgtctccgccggtgtcgccgccaacctcctcttcgccttcctcatcgtctacacccaggcgctcatcgtcggcgtccctgtccaggcgcagctccccggcatcctcgtctccgaggtcatccctggctccgccgccgccggccggccgcgttgccgaaccgccggatgctggagagaggagagaggagatggggagagagaggaggaagaagatgaggggagtgaatgacaagtggagcccacgtgggccccactatttttaattaattcttttggtgtagctgatatgtggggtcactctttttattaattttcaaatcaaattgccacgtcaatgccatatctatgccacgtcagataaagaatgggtcaattttgccacgtaggcaccacataagccaaaaccgccttccaaaccgccatgggacctatattgcactgattttgatagttgagggacccgttgtatctggttttatggttgaaggatgaaaatcggattcgttgacaagttaagggaccttgtatgaacttattcctattcggttatgtgccccttttctcatgggctgttaagtgttaacttgcaagaaccaatcctatctttcgagttgggccttatgcattagagtggacttcactgggcttttgtaagacccacccaacctttagccatccaaccaatgaacttgtagaatgtttttttttaacgaaccgacacaagacagtgtcaatttcattgaatagagcatgaggaaaaaactttacagcttatacggaaattcccgcgcttgcattgttcttcttcttttggtattcagtggtgtgctctatgaacttgtagaatgtgatggactgatggtgatatttgctgaaagtcatgtatattcttgaatgatcgcatccaagcttgtttagtcagtaggacattgaacgattccctcatggttgttcaagtttgaagcttaaattctacggcccaaattcgaagtagtaatttctccttttcgcagcctactacaactactactctatgatgactttcagcaggcagcatgtggactggaaagaaatgttcttcagaatctagaagcaaaggctcaggttcagacagtcgccaacatcagtcttcaaagttgatttgatgcgacgccattagtccaaggttaactttgcaagggtcatgtcactatgagaaagaacattaatttagagagagagagggagagagatagaaagaacaatggcaaagcttaagggcccctttgaatcgcaggattgagaaaacgtaggaataggaaaaacgtaggattttgataagaatgtaagtgtaaaacaaaggattgcaaaacacaggaaaaatacaggaatgactgtttgattgaaccacaggaaaaacacaggaattggataagagagatagactcaaaggaaagttagcaagaggttaaagctcttgctaaatttcctccaaaatctctataggattgtccattccataggaatttcaaaggattggataggattcaatcctttgtttcaaagggcttcataggaaattttcctataggattgaaaacctctaaaattcctatgtttttcctccaaatcaaaggggccctaagttctagaaacaacagaaaactatgacggtccgtattcatcttatgctaatgtaaacacaaaggatccaggatcacagaaagtgatgtaagtatggttagggattgctagccttgactagtacgcagatgtgacaatattaggtctgagtttttcaccggtggcatggcattcagcacaatgtaaacttttcaacacttgtagttgttggtttcgccctgaactccaagaagtatgcaacatggttcagaactcttgaacaggtctaagttgttgtagattcgtagccttgaacagggaaaagaagaggagcagttcaatacattaatctgttttgtgaaaatgacaggatatccaaatattcgtagttagaaggcagaataatacaagggaaaaaatcaagtctttttttttcataaaagaacccacccacatggccacatctaacagacagacaccaacagcaatctaggatctggaggggtgttttctagacaatggagcaaataatctaggacttgaagggatgttccctttaagatattgagattaaaaaaaatcatggaccagttcagtactctattgcatttggtccattcgaggcacgagaaaatatagcgcatatttctgattccgtcatgtgtttcaaattaacctgtctgtcatttgcatcaggtaaacaaaattgcagacaatctttttcacttgtcagttgtcacacacacacacacacacagcgcactgctagataggatcataagatataacttatccccagtgactccagagtctagaagcaacaaaaaaaaaggaataagaaaacgctatagaagtcgatcacagcaaatgttcttcattttcatacgtaactgacatgctagtccagctatacttgacaaagtcatatgtcacagagtctaatagtctacgcccctcttgtgttaatttgcacttgttgaccttctgttctctcctaaaccatatatatcaagaaagtaatcggcacttctcaattaatttctttagagcatagtatgatctcactggctacttatttatgtaagtaaatagccgatcagatcagtgagcatccatgatcaatccaatggtgcacttgctatatttcctgtaagctgactttgattttgttgtcatttctccattcagagaacagaatctccatattacacactggtgcttgaagttggaagaactaaccttaaatgttgagtcaatgttagagaaagatctccactctgtttcttggacagctgatagaagatcaccgatgatagcgaatggcagaaaaaaaaatctttcaaatgccgtcatatacaaagaacttgggttttcctttccctattcccatgctgcattaattgatttttcatgtacagtgtgtactctcaggaaatatacaatattgtctcattcatgacaatgacataaatagttcaatatttcaatgtgctacaggagggcgttttgcattactctactactagtatcaacctatcatcattcggaaattcagacagactatgtggttttgttttttcccactctgataaaacatttcgtcatttttttagcattactggacgccaaccgccgttgtgtcaacatgggagtttttttttttctatggttgatgcgagattgtgccttttagggatttctttctgtgaagaccctatgtttccaaacaaaaccttagaaaatatgatccctctatcgttgaatggcaccttggacattcgagatggtcacgcatcatcaggccatccagtagaagagttcatcattgcatgccttgtgagctccacaatggtcgttgaccgtgttaagtgaaccgtcttgtgtagattaaactcttggcaaggcaatccattaaccaaaaccaaaaaaaactcctgggagtctagctaatgatcaactgatcaagttggcactgtacgtatacttggtactacctctgtcccataataattgtatttttaatattcgaatttatcccaaaataattgtcacaatatagtactaatggtctcattaatcacttctcattcaaaattatctctattttacccttaaccacccttccacttttacatatacaccatttaataaggggcatcatagtttttcttttcaaaccttaatatatgctaaacaatctagaattacaattattttagaattgcaatgaaagtaattgtgaattcataatccgaacaaaggccttttagcaggttcagtgcaaaagctggatgtactttcattgctcaatgaattatccattacctaaaaagaaccagcctttttaattatgttaattaatgaaaagagcgtttggcaagtggacagaaaacataaagtttattgggcaatattggtgcttactagcatggttatgttgagttgttaagaactcaccaaagagaatgaacatagacacattgcgcacagtttgtcaaccaacatgtcgcttgcacgagaacaactcactagtgcatacagtggacaaaggcacctattaatggtaagagctcgtaagttgactacttgcaactatttgaaaattgatgacactgtgtatctataatgtggaggctcatcccatcacccttatcttaaaaatcaatatgagatcaggacagtggcggctaagaaaaccattattatttattcacataataaagaggttgcctacgcgatatttccgttgttgcaagaaacacgatcttcggctacgttctccatcacatctgtctttggtgccatcacctcgacgattttgcaccagccatcgtattcgagtgacgcccacatctatataagaaaataaaaatataaatcacatgggtgtcgagaaaaattaaaaataacaaaaaagtgaccatgcacatgctcataagggccacgcaccagcgacctgtccaaccaagacccggcttgttgcgatgcgagctgcgacgcccgcttgcgcccagagctagctcgatcaacgcatgcatctcaccgatcgaatcgatcggtttctttcacggcctttgacccgtcacacgcggggtcgattcggtgatttcgatcccgtccgctgcacgcagtcccgctctcccacccgaaagcccgcgccgtgccgcctgcgctaactagctttgctacctgctgcgttccaacttttcttggacccactcgaccccggccgatcctgcggtcgagcccttcaaccacgcagcgcacgcacgcacgcatgctgctcgatctgctctgccccggacgaggcgggcggccaatgcgcccgcgtcagacgctcggggttctgtgcgtgccgtgtcgtgtgctcgtgtttgtgctctcgtgtcgtgtttcgtgtgtgccgtgcagcgacctgcgcttagggtacccacaatggttatctataagctctctataagagattcatgtcagtatattttcctacttggaagatattaaatgaatagatagagcaaagctatctactaacttagagatagtctatagagaaaaacgaggcaatacatgagagagctatagatacccacgtagacatactattgaggtggtttactattaatctagtctattgctgagatgtacatgttttatagataacaccttactttaccattgcgggtgctcttatatgctgtggacgtcgtctcgttctcctgggctcgccctttctgtccccgtccgttctagattttactgcctccgttcttaaatataagagattttagttggatatggcatattctaatacaacgaatgtggatataatcaaaatctcttatatttaaggatggagggagtagtactccaaagggacgatacatacctccaactttacttggacgtggacccgacccgatcctgaaattaaatttgaaaaatatactgttgattctttttttcttagaaatattcgtgatgcaaactttttagcagaaatataccgtcgatctcgcacaatcgttgtgcgaaagtgacgagagcgtgaggacgcatgcggtatcacgagatggaagaactagagcgaacggctcacataagaaatcagcgagaccgcatgtcttgtccatcagtattgcttattaacaattttcaacagtcgctatcgctcattgagtgagcgagattgctcggtctcgcggtttggccgtgcgagaccgcgtggtctgacgccgccaccacgcacgtcctcgatttcgcagttcagtgccgcagtttcatcgtgcgagaccgtgcggtttcgcgctatcaccgtgcgacaccgtgcggtctcacgctgtcattgtgcgagaccgttcgcgtcgtcactttcgcggaacggttgtataagatcgatggtatatttctgctaataaatttacatcccaaatatttatgaaaaaaaaacgaatcgaacattatattttcaaatttaattccccgatcctgcgggttcgagcccttcaaccacgcatctgcggccgcacgaggcgggcgtccaatgagccgtgctgtgtcgtgtcgtgcactcgtgcgtatgccgtcttatctcctgcatatgccgtggcctgatctggacgccgtctcctggctcctgcaggttcctcctcacccttcctgtgtctcctgcctccgtccgttgtagtagtaaaaaagggatagtactcgtaactcgcgaaggcgataggagggtgcgcatgcgcggctggtggcgagccgagccggcacccggcagatcgggcgcgcctcacgtctatatagacactcacgggggccgcgtcgtctccatgccctcaccctcgcgcactcccattcccatcctccacatcccgcgccatcgacctcctctccccgggaccgcgtcgctcgcgcgttgcctccacctccagtagcaagtatcaatggcggactccggcaagaagcgggacgggtcggccaacggcgccgagaagaaggcgtcgccgacgccgaagccgccgtcctcctccacatccggttcgtcgttcgttcgtcctctcccctccctccttctaggaacacgcgtgctgcggcctgcgtgcgtccatcgcctttttgctttgttaatttctcgtgttcaacgcagcgtttgtttcgtagtacgtcgtcgtagcctgttcgtgatttgccaccgctccctgtttttacaattttgctgtataatcagctcggttgcggtctcgatctcaagattgacactatctcacataaattaattatgatatgaccgcgtcattgtttaagatcggccaacgggccgcgagcccgcgagaggtcgcgcgctcttgtctgcatgcatgtcgattgtcggggtactcaatgctgtgaccccaatgctttcggcgttaaccatctgtccttttcgttcatcccgaagctaatttatacgcctccatccacgtttcttctgtcctcgaatagttggagtttgcgtgtaggtcttgtgatttttgggtggcttcatgaacaaggtaaaaaggcctttccatcaaaaaggtaggtagtagtagtaaaaagaaaaagaaaaaccgaaataacaggtgcagattgacccggtgggccgggcggctcataaaaattaacgcttctgacttgatcacataaatatcaacagttccgaacaggtgacacgcaactgtacacaccttgatgatcgatagggcctacggcattcacgcacgcaagtactactcctatctacttatctaaagctggctgtttagcccgaatttgattgggccacgtggcttcaatcagtttgcaataaatctatgatttcctgagaaaaaaatataagaaattttttaagagaagaatctggagccatgaggaagaaaaatcgcaggctcccagcatgaggaagaaaaatcgcatgctttaagtacattgcctccacacgcatgagcgaatgatgttgggtcttccttggcagctgggctacaccttgcctgggccagcgggttgagaagatgagttacccaacatcaaatatacttaaagcattacttatgatttatatttttttatatttgtataatgcttttaataagaggaatggtaaatatatgtatatgtgcgtcaaatattaagaatcggagtgagtattttgcaaatattgcactactccaaatgtggtggtgcaagtgtaacgactttacgtgcatatgttccttgcaatattcaaacactgcttgcaacaaaattaatcagccgaaacaagattatcatgttttcaagcccattttaattatcacctccgtagggactagagataaactagctcattacttcaaatcataatagtattgtcaagacaattatcacatacttggggatgggcgtgttggtcttgtggcaaatggacatagtactggccacttggaaacgataagaaaactgtcacatcaacgtgatttttgttgcaatgtcgttgtgaacatatacttgtctgtattttgaggtaatgccaagttatatatagttgttcatcgaataatagaagagggatgtatttgatttatatagttgtatgcatttaaatctccaaagaatggcatattaatgttataaaatatgtacgtatatttgcaaacgttaaaatttccacatatttttgattaatcatctgtattatggttaatcgttggacaatgccttttccgtcccatgattgtattctgctattctgtcttccagaacgcacccacgtccaactgagtatatcaaagcagtgtgaagtgtgaactgctcctaattcttacaatagtttataactgcatgacttttcaacacatcttagtgtcatgttgtaatgaattgaccattgataaggatatatttatataaatgccgacatgcgacacttgaacctcgcaaagtcaacgtagtatcttatatgacacctttaggattataattacatcatactccgtgctactccctccgtttaatattataaatagtttgactaaatttatagtagaatttagtaatatctaaaatatcaattagtttcattagatctaaccgtggatatatttattttgtgttgaaaataatataatattttcctataaatttagtcaaacttaaacaagtttgactataaaaaaaatcaaacgacttataatatgaaacgaatggagtagataatagtagtatatcagtacgtagcaaggtttatagtagaaccggtggtaaccggccaattaacgactggtctgccagaataaatcggccaaataaccaaattggaataatttaaatccaaattgattttaatttttttataataataaatttgatagattcatcaatattttcaacataccgatgtgctttttttaaaaaaaatatatattgatgtgcctcttttcctggcaggtttctccaagaatgtccccctcctcgtgtttgtgttattgctggggctgctgtaccggcagcttcagcctccggttccgaaaatctgtggaactccgggaggccctccggtgaccgggccaagattgcagctcaaggatgggaggcacctggcctaccacgagtacggcgtccctaaggatcaggccaagcacaagatcatcttcgtccatggcttcgactcctgcagatacgacgccctccaagtgtcacctgtaagtcgcgatcgatcgattactgaacacacagtaatctgaaaatgctgagcccctgggttactgaacggaagctgaatgtgtataacaggagctcgcagaagagctgggtgtctacatggtctcgttcgatcgtcctgggtatggagagagcgacccacaccccggtagaacggaggacagcattgcgttcgacatcgaagggctcgccgacgggctgcagctcggccccaagttctacctcatcggctactccatgggcggggaaatcatgtggagctgcctcaaaaacatccctcacaggtatgtatacagtgtacattatatacaccaactgccgctttctgaacattgttgcagggaaaattaaccaaaagtgaaatttgtcctgtacgtgcgcgtgcaggctcgcgggggtgtcaatcctggggccggtggggaactactggtggtcgggttacccgtcgaacgtgtcgacggaggcgtggtacgtgcagctcccgcaggaccagtgggccgtccgcgtggcgcaccacgccccctggctcgcctactggtggaacacccagaagctcttcccggcctccagcgtcatctccttcaaccccgccatcctctcccgggaagacttgaccgtcatccccaagttcgcctaccgcacctacgccgtaagcaaacatgatcgatccatagtactcctacttttttatgcgtgaaaatggatggacgatatgtgctgaataattaaattgcatgggggacggatgagatggttgcaggggcaggtgaggcagcagggggagcacgagagcctgcaccgggacatgctggtggggttcgggaagtgggggtggagcccgctggagatggagaacccgttcccggcgggcgaggcggcggtgcacctgtggcacggcgcggaggacctcatcgtgcccgtgcagctgtcgcggcacatcgcgcagcggctgccgtgggtgcggtaccacgagctgcccacggcgggccacctgttccccatcaccgaagggatgccggacctcatcgtcaggtcgatgctgctcaccgacgagtgagatcaccgaccgaccgaccgagacgcgcatctctctgttttttttggtttttggaattttgggtactgtcacgtaccgacgtacggtggtacgcgtagttgcttgctcctattatcctatcctatatagagaaatgacaataatattttgcggagtcattttgcctcgtttcatctaccacatttcttcgtgactactactgggtctctcaattatctgagccggaacgtgattatggagagcgttggggcccatgtcagttgggccgtaaacgggcctcggcttacgtgcagccccaatattgggccttacggatgtgggctgagagtagttctagttgggctaggtggttgaggggacactgggtgacacacaccaccacagggaataagttcactttgggtccctctacttatcgcccagtccgattttcgtccttggccacaaaaccgggtatgacccatcccccaacttacgaaaaccgggcaaacatgatccctcggcggttttgaaggcggttttggctgacgcgtcgcatacgtggcttctttgactaggtctccatcccacatggcattgacgtggcgcttacgtggcaactatatctcgaaaaaataataaaaagcgtggccccacatgtcagctgcaaaaaattaattttaaaatggtggggcccatgtggaccccacatgtcagcctcactcttctcttcttccctctcccttctctctcttcttcccttcccccctctcactctccttcccgggcagaggacggcgcgggtgggcggcggagcaggcgagctccgacagcggcggcggccatggtcggcgccggcccccgaccggagcgccgccggtccgcgtgaaggcgagcagcgcggcggcgccctggaagacgccatcgacgccgccatccgtgccgccgccgccgaccacccggacgccctccgcgcgcaccgggacgacatcaccgagcgcctctacaccgcgctcgtcgtcctcccgccgccgctccacaagccgcctacgccgtctctcccctccctcatctctcgccgctgacgccgcgccgcgccgctccctcttctcccgccagcggccatcggggagaagggcggcggacggctaggcgagcggcgcgagagatggccgccgccgccccacaccgccatgaggctagcagccgacgccgcaatcctcctccccccgctccaagaaacgctcctcctcctcccacaggccgcgctccctcgcgctggccgtccttgccaccgacgcctcggcgaggaggggaggaggcggaggggagcgcggtcaacgatgacggatggccccatccattgcgccgcccttgccgccaacgccaccgacggctcgcttgctcgcatgcggggaggaagaggaggcgaaaaggccgacggtgagcacgcggggagagggaggaggcggcgcgggagcacgccggggcttcgagtctgccaagtccacctccgcggccggcgggaggaccaaagagtagcggcggctcgccggccgccaccgctccactcccacctacggcccctttgctccgcccaccacccgccgcccctctgcccgccgtccttccgcccaccgcccaccacccgccactcgccgtcgctccacccgtcaccccctctgcgccggcaacgccgccgctcgcccttctgcttgccatgtaggggagagagagaggggggcatagagagaagagggaggctgacatgtgggaccacatgcgtcccacctttttttaatttttttacctgacatgtgggtcccactgttttttattattttctcgggatcaaatgccatgtaaacgccacgtcaatgccacgtgggtcgacgacctagtcaaatggagccacgtcatctaaaactggacacagtactgccgagggacctcttttgcacggttttgtaagttgggggatccgttgtatctggttttgcgaccaagagacgaaaatcgtactgggcgacgaatagagggacccggagtgaacttattccccaccacagcatcgatctgtacaaatgcgtcgatatcgatgtccatcattttgcttcctggcctcctgaacagtacacatcatcgacatgtttgattgcctctctaaacgattctgtacattcagcacgaaacaccatttcaggaaaaaacaaacaaacaaaactgagcatattttgaagttgagttaccctctcgattgttccattcatctgtgcctccttatacatctctaccaaccttacacctcaaatcattaccaggctataatcaccatttcccaaccaccgccacaaatgatacagtactgtattaaccaaatgaaatgaaaagaaataacccattaattatcactaacggggagtaacctaatcatgcccacgaccgacggccatggccggtcaagcacaagcggctagctaatcctccatctccgccttcttgggcgggccgaacctcttctccagccgccggagctccgccggagtgagcccgaacgccctctcgaggacggcctccctgatgccggacccgaacaccgtcgccgggatgcggacgatgccggggttctcgctgttgaaggcgccgtagaccgtggccggcgtgtcgccgacgttgagctggaagtgcaccatggcgcgcgggaacaccatcacctccccctgctcgagcaccttggcgaagaggcggccgccggagtcgacgaacccggcgtacacgcggccggcgaggacgagcgccgtctcggtggcgcgcgggtggtagtgcggcgggttgacgccgccggccgccgagaggtcggcgcgggcgaaggacatccccagggtgtgcaggcccgggaactgcgccggggtgacggacacgccggcgaaccccgtctccggcgagaagttccccgcggcgcgcacgccggagaaggcgaagtcgcccgccgtcaggttggcggggctcctgcacgggtaggccgggagcatggcgagctccaccggccgcccacgcccggcgtccggcacgcagaagtcctgcaccgcgtcgggatcgccccttgccgccatcgccggcagcagcacggcgagcaagaggaggagacaacgacgacgatgcgccatcgattctacgctcgttctgtcactcgttcgtcggtggacagctgcttgctttgcacgtagtagtacatatgtagtcgagcactgatgtcttgtaaggtgagttgatcattgccagtaatcatgcaggtattgatccgtaggttattcttgtattttgtcatgcacgagcagttgtaaagcgtcgatcggccgctttcccggaagtgcagagatggttagaaaagttctcttttttttcttcatgcggaaaagaataggaaaagtgaagggatagaaatatatgtacatatcaatctatagaaaaaaaattagaggtttgagtggatttttttttctctatgcaacttgtaggaaagaaaatattgttttggctttctcatactttattttaacaaatcgaataactcatatagaaattaatcctgagaaatccaaattctttacttttcctctaagaccctatttagttcccaaaacaaaaattttcgtgccgtcatatcgaatgtttgaatacatgtatggagtattaaatgtaggaaaaaaaaccaattacacagattacgtgtaaattgtgagacgaatcgtttaagcctaattatgccataatttgacaatatagtgctacagtaaacatttgctaatgatggattaattagacttaataaattcgtcttgtagttttctgacggaatctgtaatttgttttgttattagactacatttaatactccaaatatatatctgtatatccgatatgataactaaaattaaaaattttctccaactacaccaggctaaatcgaacatgcccctagttctggaagtgtattgaagaagcagggagggaggctctgaagaatggtggcttctgtggattttcaagtggacgctgcacacttgcacagtgcggactgcggaggaccacatgggctggcattattgaccggaagagtcgttcaggtcgtcgtcaatcgtgcgtgcgtgcattgaacctgtagataaggcttccaagaaactcaggaccagggaggagtcataggatccagcatagttggccaatagttcccacgactggttaaaacagaataatctgggaatgatcatgaataataccaataaccggtttggcactcggctttcagttcagtagcttgtgtttatacatagaatgcacatcttttctcaacagtcgactaccgatgaaaatctttcttataacatttgttccctctatcttaattgaagtgctccgagcaacgcatgttgcacggcatatctatcgtaggcatgaccagttgtgacctgtatgtacgtgcgcacatcgatcgccttttgagatcatatatgtgtatgaatcatctgggcagatataatgatgctttcgtggcgtagcaggctgtccatggccgcctccaaccggccgggagcgcgccgccgccggatatagaaagggataataatcccttgccgctgacgcaacttaatcgcactcctgcatcattgcatcttcggccagcgcagcccctccttcacagaaataatgcgttggaatatcatagcacagaaaagttataagcagagagctccattagcaaactggagtataatattagacaggtgatgtctaatctttgtattaggttgctacattcatccaactgttattcacgaaaagatatttcatgaattttataggatttctgttggatttagtctcatttcaagaaaaaaaaacatttctttccattccaaatgaggccaatctgaatcctatggagttcttttcagttgatttcccttaaattttatttttgtaggagttcgaccaacaagtttgtctcatgatctgtctaacggtattttgggcctcaatttcgtgggcttctggcccacgatagcacatcaaacaatggccatcttccaagttgcaaaccttctgttaggcccctttaaatcgcaggaacgaaaaaacggagaaatatgaaaaatataggattctgacaggaatgaaggtgtaaaacagaggattgcaaaacatagaaaaaacataggaataaccgtttgattggaccacaagaaaaacataggaatttgaggagagataaagaatcaaaagatttcttccacgagattctacctctggttaaaatttctccaaaacttgtatgggaaaaggcattctatagaaattttataggattccatagggttcattcctttgattcaaagggctttataggaaaaattcctatagaaataaaatcctgtaaaattcttataaattttctttgaatcaaagggggcttactgtttttttttcgtttcaggttctaccggaggttacttcagtgctgccgtgcctggaactgaactatccaatgctatcgaagaacagaagattgaaagtgacttgtataaatggcggattgcatgatgcaaatagaactgggttttttttttctggtggttgaattgctagcttgcattcctttcgaaatctcttgagagatcatactttattagtcctatttaaattcaatgcttttgttggaacgcgggtgtacctttcaagttcctgttgttccatttggagggtccggccgaacaaatggctgacagcataccgtccatttctaagatttttaatgaactaaaaactgaactacaattgcagatcccttagcacacaaattacgagtttgccctgagtaaccaacgatctgtgatcacagaagatgcatatattggcctttaattaatctcttcttaaaatatacttcctgcttaggtcacttacagggttcacagaactgatgtaattttatgaaactgctaggtctcgatttgtgaaaaccggtcggtattagctggtttctgtacggtgttgactaaaatcatcggtttttacccgttttcggtcggatttcggtaaagctgtgaggagtggtttctacttcgaaattgaaagggtaaaccctggtcacttcatttatttatttttttttgcttacacgcttgacctatttctatgagcaacgagtacatcttgttttttttctaataatggaattcatgtcgacctttgctttcaaaaaactacaaccaattatgcaaagattataggttgaaaaaaaagaaaattacaaaaccacaacttgattaaaaaataagataactacttagattaccaacctaaagatcaagatgaaaccattggcttatatgttatacgtagtccttatcttcatcacatcgagaaacaaattctccaaaaatatcagtcgatcattaccgatcgaaatcagcatcgccgccgacgaaaccataacggaagataaagtcggagagtaactaaggctgtgtttaaatctaggggtgtaaagttttggcttgtcacatcggatatacagacacacatttgaagtattaaacgtagtctaataacaaagcaaattacagaatccgcttgtaaaccgcgagacgaatttattaagcctaattaatccgtcattagcaaaagtttaatgtagcaccacattgtcaaatcatggcgcaattaggcttaaaagattcgtctcgtaatttacacgcaatatgtgtaattagttattttttcgtctatatttaatactccatgcatatgtccaaacattcgaagtgacagggtgtaaaattttgctaggggatctaaagagggcctaagatgtaaaacaacctttcgcccaaatcttagcatcactctaactatcgaaattggcactaggtgcaccaacaaggacctccaatgctacgccttcaagaaagtcacgatattcatgatatcaccattgttgttccggacatttgaaactagggtttcacctaaagtgtccactcgaaagcaagaaggtgaggcaagatattgcgacatcgcctctaggaaagtatgtggccccacaagcatcaccaatgtcaggtgtgcgtgcctcccccatgtcaccacctcagcctcgcgctgtctccacctccactacaccaccggcttgacccacaaccaccgccaacccccaactagatccagctagccctccaactagagggcaactggcaagcatggactagagggcagctgccactaggatcaatgagtgcacttaccccatctctgccattcttgccatcacgcgacaacagatacctgatgatgacatcctccactattacccgccagcaaagacgcaaaagtcgggcggcgaccatgtgagcctctgaataatcccaccttgcttagcttgggaggaggaagccaccttaaaagggagagccacccttcctctattggactagtcttttagagagattgggcctttccccgagtgggtgtgcctatgaactgttggagtccgggcaaccttaagttattgggcctcgaccaactccacctgggccggattgttatcatttggtatcagagttgggcccttgttaagggggtgggaatgatgaggacatcctccactattacccgctagcaaagacgcaaaagtcaggcggcggcgaccgtgtgagcctctgaataatcccaccttgcttagcttgggaggaggaagccaccttaaaaggaagagccacccttcccctattgtactagtcttttagggagattaggcctttccccgagtgggtgtgcctatgaactgttagggtccagacaaccttaagttattgggtctcggccaaccccacctgggcctaattgttatcaataccatacatccagcagcaaggaggtgataccaccactactggagaaaggggctttagtcccggttgggaaccccacctatagtcccggttatgcaaccgagactacgaatccgggactaagtcctgggagaaaggggctttagtcccggttgggaaccccacctatagtcccggttatgcaaccgagactacgaatccgggactaagtcctgggtgaaataactgggagtaaaaatccggttgggaaccccacctatagtcctagttatgcaaccgagactacgaatccgggactaagtcccgggtgaaataaccaagagtaaaaatccattttccaaccgggactaaagatggagctaggccaggtccggttgctctttttttttcttttttcattgtttttaacatcgaatattgattttactccatcgccaaatcatacctaagaaatcccgaatcctcaaatcgatcatctccaaatacatcccaaatcatcacagatcaaaaggatcatcttcaaatcctcaaatagatcatctccaaatacatcacaaattcttaaaaaaaatacatcacaagttctaaaaaattcatcacaaatacatcacatattcacatcacacaaatcaaatacatcacaggatcatgcaataaatcacaagttctcaaaaaaaaatgccagcaggggcgccggccggccggccgctgccgcgccgccgcttcgccacgccggttgccgccgcgcaggctggcccgcccttctcttctcgtgcgctcgctcagccgttgccgcctcccctcctcccctccgcgtcggccgccgcgcggccgacccaccctcctctcatgcgctcgctcagccactccttcgctatgaaggaaggaaagaggtaaggctaagaggaaggaaggagataaggagttagagaggaaaaaaagagatacgagagaggagtttgtgtggagggagaagatgataagtactagggattatatagtgtgttttgatctttagtcccaattagtaacactaaccggcggttgataatacaaaccgggacttcccggttggagttaccaaccgagactaaagattccggaggaccctgacagcatgtgaatcgggactaaagatcacatagtccttttctgcttataaaccgggactaaaaaccatctttagtcccggtttttattgcaaccaggactattgtggtttttaaccgaccggacaaatatggtttttctagtagtgcacatacatataatgaggacagacgattgcatctcctaacactcaaagatacgaatatcaacattcaacaacaaattctgacttctctaaatttctattgaaaatacacgcaaaattaataatggagactagctagcagcaaatccctaagcaacgaacgtgatcaaagcgcacatcagtgcagcgtgtgtaatatttggccattatattagaccatggtggtctggtggatggatagttcagctactgttttcctgaggctgtatatgctgaaatatactccctccgttttttaatagatgacaccgttgactttttctcacatgtttgaccattcgtcttattcaaaaattttatgcaaatgtataagatataaatcacacttaaagtactatgagtgataaaacaactcataacaaaataaattataattacgtaaatttttttgaataagacgaatagtcaaacatgtgagaaaaagttaacagcatctattaaaaaacgaaggtagtatattgtttcctcatctaataatatatatgtatatatgctgacatagttcagctactttcatgagggtgtatagtgaacgttcactatttactaaaagagtgaacatggccataaattagtagttaaagtctgaaattatctgacttcaatagcattcctgaatgtacgtattattccatgattgtaaaaagaaattgtgagatcgacctctatatagagtgaaaccatcttctatatagccacagcccacagtggcggatgtagacaatactgttttttttcttttttggctgagtgcggcaagtttatttcaaaaaatttcataaaggccacgaacgttttttctttgtttgaacgtggaagcaactttcaagttctattgttctactgggcagaatgcaagcaaacaggacaaaaactgtgccatccacttccaatatcataattatgtttgaagcatgcattctttttttttttttttgagaaggagaggctcacctccctcatttcattagagaaatgaaaacagtcctacaagcaatccaaactacttacaacccaactccaagtttgaaacttccaaaaacatcgcacatgactaccaatctaaacattctgaaaagaacagagagaacagattccaccctatttctctaaacaccattctccagcctcttgatgcaaggattccatccatgactcgccttgtacatatcagcggctaccttttttagcagcacagctcccagttgcaagtttgaagcatgcatataattgaactcacactgcacattaattccgtatgcaacacagacctgccatgagtgctacatatatatgatgatcaagtaaagagcaaaatttcatattgggttcaaatctacgtaggagcaaatttcagattgggttatttgaggactaagttccatatttgtttggctaagtttctaatttttttttaaaaaaagactgcgtatatccaattggatatagaagccgggtaaaaaatatccttctctaaaaaaataataataaaagagcaaaatgtgtgaaagttcaattatatgctcataattatgcatgttggagccccaagttgttgcaggtcttcatccttgctctagatatgacaaattcctgcttttatatgctactcttttcgtctcaaaatataagtgattttgtttggaagtgacacatctcagtactatttgttcagattcgtagtattaggatgcgccctattaaactaaaatcacttatattttaggactgatgtagtagaaagctccgttaaattttgcaagattggcatctgcgatttcacatgcttttctctgttgattgtgagctctaaaagcagatacctcagatctgtatatgaattgatcgtctgctcgtactagactgttcgagccattctggctctcagaaacatacatacttatatcgattctgcagtgggccacaacatccctgaaggtcaccaaaccaccacataaacaggaagcaccaaactttacggtgattctgattcagctgttagtcaaggtaaaaaggggacggccacctctcaaattacaggggtcgctatcggaagaaaagaaaacaggcgcatcaggaatagttccttgtgttttgttgggggaaatgcctctcctgtaacgtcgcaactggacgcaaggcggttactctaaatgaaaggcctcgcaaccactcccatgtacatactggtaagtaaagatagattaatcactagtaaaaaatgatttttctgaatgccggtcccgatagattccagacgggtcgtaagcaactggcgccggactgtcgcccacacgaaaaaatgcattattccgtgcgggcgttttaatccgaccgcatatgataatcctcattatcccgtgctgtcgatttaagaggaccgtacggaaaaatcgattctcgcgtgcgggcctcttaagtcgaccgcacgggaaaatacctctccctctttttcttctcacgcacttcaaatttttcacatcctctctcttccttttcccttttattctccctcattcactcctctctctctcttctctctatgcctttcctctcctccccttcccccctctctctcctctctctctatacctctttcctctcctcccctccccaccgagcgcacgaggcgtcgctgccgccaccgccgacggtacggaaggcagcacggcggctgctggcagaggcagcgtggcggcgacggctgacggtcgcggcggaggccaatagcggcggcggcgacgaggatgacggcgaccacgagcggcggtggcgcaacgatgacgacgacgacgggagcagcggcggtgtaatgacggcaatgacgaggacgacggtgatcacgagcggcggttgcgcgaccatggcgatgacgacgggttttgttgggtttatttttctttttttcgtgcgggtggtataacttgaccgcacaggataatcgattgtcccgtgcggtcgacttaacaagaccgcacttatcccgtgcggttgggcagcccacgcacgaaaatattgattttcacaaacctctctgggtgcagacgggcgctacctccgcactgaaaaatgaattatgtactactaccaatctgaatgtaaaagaagaactaaatattactatccatgagatcatcatgacaaaaactagaattgcccagctaaataggaatagaaataaatccagggtaacttgtatcatgagatgggtcaattccaatttgaattccgtacggctacaactctttttaaacgagtcgaagtccagtcttgtcactttccccctttcttatcctcttttttatccaacctcttttatgtattcttgaatgtaatccctccagggcatgcttcatttttttccttacatacaaaattaatagctacaagaattgttttccttacatatatacaaaaaaattgttgtagctttagcaagatttgaacgaaaaaacactggtttccttcaacaaataattaattatgtagtgtttccagctcctaccggctccagcaccattgccgtgcaactatttgctggaagttaagaattttttacataaaacgtcatttttttttggtctcgatgagcgataatttctagggaaaatcggaaccatgccattataattttgcaaaatttgagatataccatcttgacccacatgtcattgactcatgtgggccctacatgtcattgagataccgatggcatatttcaaactttgcaaaattatagcaaaattttacggccatgattggttagtactttgatcagaaatttccattttagaacctagaacacccttgcaacagcgaattgagaaaacaggggatggaaaaaaaatattttggtagaaatacatgtataaaacaagggattgcaaaaatagaaaaaaataatagtttgactagaccacaagaaaaatacatgaatttgagaaaagatatagattcaaaataaactttctatgaggttggagacccatgttaaattttctccaatacatctatggattaaggcattttttttcgaaacaagccgcactatacagtgtgaggttttatattggtatagcgataagaaaagaacaagattacaccctataaggctataattagaaaaagaaaaataaaacaccactacgtgttgacaactcctacacacaaactcggggaaaaatctagcacaaagccaatagttattacacgtgaccagtggctgctcacccaacaataaagtcacaaacacactgccctacacatatccaagcatatagccaccgagaagttcccggtcatcaccacggagatgggtttgtcgagggagagagcgagagagaagaagatacactcatccttcatgcatacccgatggcaacatctaagagcaccgtggtagaccatattgattgaaggctgaaccacggtctcttagacgatgcctccaaggaggtcacgactcggaagtgccaccaccgcccatctaagaaaccttggacttggttttcacctagagaaacctgctaggcagggagggagatgtcttgatagagcccacaagggagatcacagcaccctaaggcgtcacctttgttggaccaaaattgggctaggctttcgtttgtaacctctctcctgcctatggtcacaaccctatcgcctctctaccattcgacctttgttagcacgcaatttccaccacaatggtgcccttcgcccagctagcccatgcccatcttgagatggtccttacgggacctcccactcctaccaccaccgtatcatccccctccccgcgttagcacctcatatccgcatattggcgcttcacaaccaaaccctcctaaacaacaccacatcaagattgccctccaaaccaccacctccaccctcactgtggagctccctatgaccagatctagatacaccggctataggagggtatgttctctaaggagaagaaggggcgcctagccagagaggggagaagggcgggggagggattctacaccgcctgatctaggcacactacacacggcaccaccatccctacaactagcatcacttgtaaggatgttgcacgctgctgccatggtagtttctacacaccaagatccaaccggatccagcatcgtcggccatagatccggcaacctctagctacggcccatcaccaccacaacctcaaagacatcattgtctaacccccacacgttgacccacgtcaccagcggcttggaggcaccattgcttcacttttgccttgcagttgccgtcctagctcgcgcctagcctcagtcggcttgctctaacggtagcgaggtggaggaaggagagagaggggtggtggcaacggctatggttgccgccccgagccatccacacgggagcgacgcgggtgaatagagagcagcatcctatatgaaactcatatgattcaatatattatccgatcctttcatagggttatttaggaaaaaaatattgaattgagtcttaaaaaattcatacactactacatctgtccaaaaatataacaacctattattggatgagatgtctagtactatgggatgtgacacaagtactatgaatctggatatggtttgtccatatttgtagtactaaaatgggtctcatctaatactatgttgctatattttagaatagatctagtatggttttccactcatacatcaatcaatagaccaacctggcttctattttattttctagatggtactactataatttctcggaatctagacgaaaagttaaactgtttgggaaactttcgattctgagataaactgtagctacgagagaaacattgcccttgtttagttctcaaaacaaaaacttttcacccatctcatcggatgtttggacacatgcatggagtattaaatgtgtacaaaagaaaaagaaaaccaattacacagtttgcgtgtaaattgcgagacgaatcttttaagcctaattgtgccatgatttgacaatatagtgctatagtaaacatttgctaatgacggattaattaggtttaataaattcgtctcgcagtttcctgacggaatctgtaatttgtttcttattagactatgtttaatatttcaaatatgtgtccgtatatccgatgtgacaaccaaaacccaaaattttccccaacaaaacaaggcctttgtaaataggctctgaagctcatagtcaacctaaaaggcctagagtgttaaattaggcctggtttatttccccaaaatattttcctaaaaacatcatatcgaatctttggacacatgcatgaagcattaaatatagattaaaaagaactaattacacagttagtgggaaatcgcgagacgaatcttttgagcctaattagtccatgattagtcataaagtgttacagtaactcacatgtgctaatgatggattaattaggctcaaaagattcgtctcgcagtttctaggtgagttatgaaattagtttttcattcgtgttcaaaaattccttccaaaatccactcaaacatctaatgtgatataaaaaaactagctgggtggcccgcgcaattgcgcagctagcgcccaaacaaaatcatatattttttagtatgattttacttaaaatttattaaatacctatctcgttgtcttaagactttgaatgaccaaatcttatcatccccgtgtttctaattatatagtttttaaaagtcacaccaatttctaccccttacttctgccatctccttctttatttgcttgctagatctaccactttctattcattctccttggaacctttaaaaattggatcttatagattttagagtctattatcttgttaggtttctttttataatttctagaagtcacatcaaacgctgccattatactactctgcggttcgtccaatgtcttttctttttattgtcattgggattttaaaaatcgaatataataatcgttcgggttcattttttactttttagaagtcccgccaaaccgttagtggctttgccattgaactcctctgtgacttatctgctgcctcccttctttattgtcattgagattttaaaatcgaacatgattatcattgttttttttactttttagaagttccgaacctttaaaaattggaccttgtagtttttagagtttattgtctcgttgggtttcatttttcataatttttagaagtctcgttaaacgatgccactatactcctctacggctcacccgccgcctactctttattatcattgggattctaaaaatcgaacataactaccgttggaattcattttttattttctagaagtcccaccaaccatcggtggctctgcaactatactcctatactcccagtgcactgcttctcctttttattgtcattgagattcttaaaatcgaatatgattatcaatgtggtttattttttttactttctaaaagtcctagcaacctccttgtccgtttgcttcacgacctacatgttgtccctccttttaattctcattaggattatatttagtgttttattaacagttatatgtcgtatcaaccgacaccactctactcctttataggcatgttatttaatttatcttatcatgtattttaggtggtcttttctttcaatagtccttattttctgtcaccaattagttatcaataaattgtattcctaatggaattctttttttctttttctaattttagaattttttttcaaattttaactaataccgtatagtgttcttttaatatttttatttttcaattccagttgtttcaaaattgtattcctactcaactctcttttactttttttaatttttgatattattttatttttcattctgaattttaattaatctcgtatcgggttcttatatggatttttctttcaatattgcttattcttaatttcgaatttctgttaattttaaattatattcctactttaactctttttttctttttgctaattttagattttatttttatttttcttccgtatattaactaatatcgtattaggttcttatattgactcttctctcaatattcattatttttaattctgaatttcagctatttttgaattgtatttctacttggactctcctttttttttctctgattaatgtgagaatttctagcccccacagcgaacgtggtgcctccttttaaagctattttaataatataatagatttcgcgagctaaacgggagccttagtgacttactcgacgagacaattgcgcccggaaatgctaatgggcgggtgatcgctcccccgcccgcccaacgatcacccgcccgccctctcccctgtactactccatacactcctcccctactacagtacaccacacaatttttttaaaaaaaacaaaaagttagaaaaaattatgtatagaaatactatatataaaaaatttgaattcaaattcaaatttgaatcggctatgtaaacttttggcttataaactttaggtctataaactttacgtgtataaactttagatatatagaaatactatatatagaaaatatttgaattcaaattcaaatttgaatcagatataatttaaattcaaatttgaatcgggtatgtaaacttttgccttataaactttaggtctaaaaactttaggtgcataaactttagatgcataaaaatactatatagagaaaatatttgaattcaaattcaaatttgaatcagatataattcaaattcaaattcaaatttaaaacgggtatgtaaacttttgacttataaactttgggtctataaattttaggtatataaactttagatgtatagaaatactatatataaaaaatatttgaattcaaattcaaatttgaatcggatatataaacttttgacttataaacttttcgtctctaaactttatatgtgtaaacttgaggtgtataaactttagatgcataaatttactaaaataggaaagtaatgtggtgacaaaaaagaaaatcaggtggagggagagaggggaggggatcgatcgctacccccatctcctggcgatcgatcgcccgttaggatcccccaattgcgcccccccagttgttgggaactggagacgagtcagatcatcgacccacacagcgtgatatggaaggcccacctcaaaaggtcgcgtcgcgtcccgccgagattctggaagcgaaaggctgagcgcaatcgcggggcgtccaagtggcccctgcaaaaaatcccccccgaaatcccaccacccccccgcggcgcggccgcatcaacccactggccctgcggcggccacccaacccaacccaacccaacccaagcctcacatctgatcacgacgcccacccccccacgcaagatcgccgcgcccgcgccacgtagccggccaaacgcagccacacagccccggccacgctcccgcctcccgcaccataggccgccccccgcgccctcgcagtctttaacgtcccagcctctcgtttgcctcgcactcctgccgcccatcacccaaccaccgcgcgcctctcctctcctctcctctcccgccgcgcgaatcgcgatcttttcctaagccgcggccacggtttgcctcgctagcttgcagtatctgtatcacacagaggggtcaaggggacggatcagctagctctctctatagctagcaaagccggccatgtgcaagaggagctgcatggcgccgtccgagtcgtgcgcggcgcggccggcggacgagaggccggcggtctgcagctgcggcggggccggtggtggtcaggcggcggcggggacgtcgtcggaccgccaccaccagcttgtgctgctgcaggcggaggcggtggagaagaagaagggcggcaggggggcggcggcgccggacgaggcggcgatggccgacggcggcggcggtggcggaggcgctggggatcaccatcagcaagcggcgttgctggcgccgttgccggtgtcgaggcggccggcgccgtcgtcggtggcggcgggggaggagagggagagcgcgcgggagcggctgaagcggcaccggacggagatggccgggcgggtgcggatcccggagatgtgggggcaggagaggctgctcaaggactgggtcgactgcgccgtcttcgaccgcccgctcgccgccacgcgcggcctgctcaccgcccgcgacgccctcgtcgccgagtgcgccgcccccgcgcgccgcccgccgcacggccccaccgcccgcccgctccgggtgcagaacggctgctcttgatcgtgatcgatcgcctccgatctccatcgatcgatcgatcgagtgctttcgtcaagtttttgcctcccctggccggccgcctgctagcttcttccaagtgaaaagttactcgtcttctatgcgaaacctattcggggtatggattatttgatcgatgtcaagtactctacttaatctgtatactacttttgactactggtggatgtaattaattagttaattgatcaccatttgcggcaagttcgatccattcttgttcgaagcaatactccgtctgctctaatataagagcttgctagctgttgattatttcatccgctctctatccttcacctttacctggccatccaatcgattaattagcaaaaaaaattcatgaataagcttccgatctccacatcagatagctgaattccccatctacactgccgaacttaaaaaaatcctaatgattcggatgagctagctatctcctgatcatccactaataaacaacaacaccttaatttgttcctgttcagtttaagttcaaaatcctagctagtatcgcatgtaatatgcagcagcttaattcattcagctctctcatcacatagatctaataacagtaggcagaggtacggtatctctggaattgtgctctaggatcgcaggtttagatcttgaattcttgatcgatctgttactatgagcaaccagcaaatgattctgcatcaacatctcaccgacgtggcctcgttcccttctttcgttggtcgtctttccatttgtggaacagattctttcctacctcctttgctttatgatgtatatggagtatctgttagaataattaaatgggctagcatctataacaaattttgagaataattactagagaaactcaagtatgcactgtacggagggatgtaagtggggtggccaagtgggcaagcgagattttttttccgcttatcacaattctacttagttttatgtttcaaattttgtactagcaactagaaaatgaattattaagcagggttttatactagtaacaagattgttcaggagaaaacatgtatttagtttcactttgttgattgctcgtggaaggagaggtgaatttttacctagggaatgtatggataataaatgagaccataacattgtaacgtagacgggatgccgagtgaaggagagagaaggcacgaagagagaaacattgactcttctttttgaagatttgatgcgaggcacaagatataagggagagttgtgtgtgggtattgtgggaagaaggttagggaaagagaaaaaataatgaataaaaatttggttgtcttgactattaaactaatagtggctctcttaatggcatataaaatcttggagtttgaaggagactcaacggttaaaattgcgtcggtaatacacaattactagtgacgatatacatagctatcaatggtgatacctatcaagtaccaaccatgatacatataggtaccaataatattattatttattaattttaatttaatactctacgatacatcaatgaaaacctatctaagaaagatgtacaacaagtataatagtaagattttattgtttagcccaaccactactggacacatggctaagtaaggccctacaaaacggcgtagtttctctaactactaactagaagaatggtaacccaacacaaaaaacacccatgtcgccctagtgaaataacccatcctgcaccaggagtggggtagggaggttatatgtagtggcggttatagtcttctagaggttttggaccaccctccattttggtacagagtactccatccttcaaatttgataaaaattttgacaaaatagatgtaatgttgacattatataatttagaagtatggtgtaggaccacgcctaacaaaaatttctaaagccaccactgtcctatgacatggaacatggggataccattccaacgtttggatggtgtactctgtaccatagtagctccctttttagcttctctcccccacaaaataccacctcaacctaattttcctttaattatcgcaccaccttaaaattgtgctgtagcagggggtatgaaattgccatggacacccattaaaagtactctttatgattgcaccactgcgaaggaacattgactccagttaacactgaccatttattaatgagaccttttgattcaacagctcaaattgcagttacgtggagtcgaaatcccaaactcgtgcttaatcatgggcctatacggccacatgcattgtggcccaacatcgggtcctgtcttgagagacggagctagcccagcccacggagaagagagcggtccggatctggttggtccacacactccgcatgcagggccgaatagacttgttccccgcgaaatcgtagtacgcgactagctagccagccaccgtccggcccacaacgccggagcgggatcaacgagaaacgcgtgcgagattctggtgcgagccggacggacgatgagtcggatcggcgtcagccactcatcctgtcacagtatcgcccactcgatcggatccgcaccgacactactctcccagccagccacagctcggtgattcgagcgtgggccgcatcggttctggcccatgccgtccgatccgtccgtaggcgagcgcgcgggtcaccgaccgtgttttttttcgattttgctatatctcactcgaaagattttttcttatctctcactcgattttctcactcaaatttacagtgcattttcttgtaagttacagtgtaatttatgaaacttacactgtaacttttgtaagttacactgtaatttttgaatcttcacatgtaaattttaaattttgtattggatttggtctttttctcgaggatatggtaatttaatgttcattatggtgtttcttaattgctttttgctttttattatatctatcggattttaatataaagattaaaaatctgtgtgatacgattataaaaatctttcgaaagatgtataggtactcccgtttttttttcccggagtagccgccggtgatcagtgatctggattctctggaaagcggtttcccttccttctttactgcttcgctaatagtagggaaactattctaatctctcgaggggatgttccctcgtttgctcaaaaatcatctaaacggttatgaaaaattctggaaaaatttgacaatattcatacaacacatatatacaactccacaaaatcttaagtccaaactcaactcacacgtcgagatataaaaaaagacaaattcagcgtatgaatagtagcgcactgtttatatctaaatttgtcttttttgtttctcgatgtgtagaacgaattttaacatgaattttgatggactagtaggtatcattatactctacattgtcaatttttttcagaatttttcgcaactatttgcatcgaatttataagaaaaaggtataggattagaatccactcccctagtactagtcgtctttctctttgcccgtcgctctcaggttcggtgattgtcgctgattaattagcagccggcggttcgcgatgtccggtttccgtttctttctgtcgatttctctctcgagatcgtacgtggagtcaaattaagatcggtcatcagtcgcccgcacactttttgcctcaagatccggtaatacggccgcgtgcgtggtgccacgcctgaggcgcaccatcgatctgactctacgggaaaagtcacgcaggtgcatgtaggacgattcgagcttacttgacatatattacacgcgacaggacaagtagtagtataaagctcgggaggacgggttgatcgatatgattgactcggttgttactctacttgtataagattaggaacacgtgtgctcttacgtaacacagcgtgcgtcgtctacgcaccaataatcacccacaaacaataagtagttaagtcgttttcaacgtgtcaattatacgggagacgacatgtttccgtcgacatgtacggtgctagcttagctagcccggagctgctgaggcgacagcgaaggtacgtacgttgccggcagcggcagcggcagcggggccagattgcccagacatggcgcggtcaagagagcggcagctgacacgaagcgggctaccacgccgctacgcccaccggtgcgcgcgcgcggtgacgaggcagccacccacagagaggcctctcgcacgtacgcgatcgcgcgccgatacatcatccgtctcgatctcctagctcgcttcctccctgcttcccaccggcaccgcggcacggctaccgcgcgcgcgcgcgcacacacaaaccaggccgctgtactcacacgtgctcgatcgatcgctagcttatatagcagcaaaaactactagctcgactcagctgtcagctccaagcctatccaagtggaacgcaacagaggcgtcgtctcctcctctcctcgacctctcgcggttggaggtctcgcgcgcgcgtgaggcaacaagtgcccgttcgatcgaccggcaaggatggcgacggcagcgagagcggcgtcgtgcacccccgccgcttgcgctgtgttggtcatccccatcctagtcctgatcatggcaggtgagttcttcgctcaatctagctcacgatcgagcagtgcttctgcaaattaatctctcctcgatcccccttcagctaagctgtctcgcttcaagctagcagcttatactggttcatcagaaagagacgatggaaattttgtgtgttttagttgctatgcatttcacaattaagttcgttcttgcaaattggggatacgatgctagctgcatttcgttggtttttatctggattagcaggtgcatttgccgatattatatcatgtgattgtgattagtaatgcgcagctctttaagacctcaactatggctaggtgctccatggcgtaagacaccgcgcccactaaggctacaaaaccaaatcaccatataaaatccatctcatttctagaagatccttctattgggtatcaatcttcagttttctatcaattctttacaagcaaagtaagcaacaatagtcgggtatatttccctttactccgctccatttttttactttttccccctccaattctgtttttgctcgtcttatctggtcatgagctgtatgtggtttttctttctccacaaagttcctctggaaagagcatttgttcatcatttattattcgcaccgtacccgccagctgaatttggtttgataggcgagttgcaacttgaaaatataggtgaaaacaaagcacagggctcgacactgcacgccgcattggaataattgagttggttagtacgtagtactactattagttcttggcaggatgccttggtggctcatccaccacatgtccatgtggtccagtgaaatcttgcttcccattggatcacgcgcactgtgtatcttgtatattgtattatatctaaaatttctttattcttcatccggggaaataaattctttattcttctacaggattaattagtccagggtaataatagtgtccaattgtaaacacattgtatcttaagaactgagcataactccgttgacgtggtgtaaggttttcccccaacccacctgagtttgaatcctaaacccagcatgtttctcatgatagcactaatgtatatattactccctccgttgtaggttataagatgttttgactttagtcaaagtcaatctactttaagtttgatcaaatttatagaaaaaaatagtaatatttttgaaccaagataaatttattataaaaatatatttaattattaatttaataaaactaatttgataatgtaaatattgctatatttgaatataaacttagttaaaccaaaacatcttataatctggaattttataacctgaaacggagggagtacttttattccgatgtgcctgcattcattgcactcatgatgataatcaagtttgagctgagctagctgttgcaatctcaaggatgaccaaaaatattacatgaatgagattccgtgtttttcactgcattctatttctcagcaccatagcacatcagaacaaataaatgaacaatgatgatgatcactcggaaaattaaacttgacaaaatgcagcaaaatatacagtggcacattttcctcgcagacagaaccatggctcatttttgcatgtatatatgcgtctaatgcaattgctggtcactgaccgtgacaaatcgcatgcatgcagggcaagtgcgagtcgcggaggcgctgtccatcggcgtgaactacgggcagatcgcgaacaacctcccgtcgccgtcgcgggtgtcgtggctgctccggtcgctcaagatcagcaaggtgaagctgttcgacgccgacccgcacgtcctgcgcgcgttcctcggcacgggcgtggagttcgtggtcggcatcggcaacgaggccgtcccggcgatggccagccccgcggcggcggagtcgtggctgcagctgcacgtggtgccgcacctccgcgccggcgcgcgcatcacctgcatcaccgtcggcaacgaggtgttcaagggcaacgacaccgccctccaggccagcctcctcccggcgttgcggtccgtgcaccaggcgctcggcgcgctcggcctccagggccgcgtcaacgtcaccaccgcgcactcgctggacatcatgggcgtgtcctacccgccgtccgccggtgcgttccacccctccgccgcgccgcacctgcagccgttcctggccttcctgtcggcggcgagggcgccgttcctcatcaactgctacccgtacttcgcctacaaggacgacccggcgcgcgtgccgctggagtacgtgctgttccagcccaacgccggcgtcgtcgacccgcgcacgaggctcgtctacgacaacatgctgtacgcgcaggtggacgccgtgtacgcggcgatccaggcgatggggcacacggacatcgacgtgaaggtgtcggagaccgggtggccgtcccgcggcgaccccgacgaggccggcgcgacgcccgagaacgccgggacgtacatcgggaacctcctccggaggatcgagatgaagcagggcacgccgctgcggccgcaggcgcccatcgacgtctacgtcttcgcgctcttcaacgagaacctcaagcccggcccggcgtcggagcggaactacggcctcttctaccccgacggcacgccggtctacaacgtcggcctccgcggctacctcccgcccatggcatcacacgaggcagcgacccaggtaagacggattactcccacattaccattcttttttcgattacatggaagacacacgtgtgttgcgacatcatacgcatagatcagcggtaaaatcttgattgtgcaaagtttttttttccttgattacacggtacacgcgcacacacacacaccagtacaaacgcaacttcacacttacatccaccagtgtttcccaatagagatgaaaaccaacgttacattcttgatctcactaaattcatatgaaagcatatttgcgtaagtataatatttataacattggaatttaaatccataatctcaccatcacatgacatgtgcttattccataaagatcatactgaaatgacactcacgtacttttttttgtctaaaaaacttaacctatgtgaggatttgatataacctactataacgaatctggatagcgtgggttgcgttcaatcatcacctagatcaggcagtcagctatgctttcacctgattgctctcaaaacattttacgtgatgtacgttgtactactgagatagtgaggtggcaatgtgacagagataaaaggccgttggcatttggcaggcaaggaatagaattctccaccaattgaagtgtcccatccgcttgcacttactagcaaaatgcatcatcaaactcaatattatactcctaagttctcttgtgaacctgtcctttacatgagccttgacaagtcatctacctttgtgtcttttttgcaggtgatccattggttcctacttatcgccaccgcatcggtcgttttcgccttatcgtgacagtatcagccactgtacttagtgagtcgtgacaactgcagttaacgggggtgccattcagaagctgaaaatggcttcgcagtgatattagattagaggatagatctaacagaaatttggaaagtattaacccaccaggcttgcactgcctttcgtcttacagtgttacagaggaagagtcatacagaagaattgtcattggtcgataatacatagcaaatcatcagttgtaagcgtatcacattcttttgggatttataaatgatcttgttctattctggcatctaaggtctggaatctggacgtatattcttgcacagctcctatacacaattactgtttctcaccaatcaggaattgattttcccctgaatgttctaacatgcctgtgtaaagcataagacttgtgcatgatcaccagtaaagtttcagcgatacagaaaccagaatgaccaagtctgatgccccagtaatggcataatcttttacttttccggctatccttctccatccataaagaatggtccctggtacccatgtcgaattctgaactttgtggttcactgctcctgtgcactgaactacctatacaaatatgctgctaaacgttacagatatgtacatcagctgcagaccttgatcaatgcaaattgactaacagtttacacaaaaatttcaaggtcgaaatagtgcgcgcctatcaatgggtgtcagaaccatccagtccagttagacgttgcgccacttgatttaatggtttagtcagatatatccaccaatcaattggatgctgataaaaatgaccatccaagcagaccaaaggaccatgaagggatagcatgaaagccaagtatttccatcagtctgattcaagctccttaaatctcttttcccattccttgacttcataatcctgatccaaaagatccttttcggtagtgtagacgatctcctctggagtaattaccttacgttgagccatgtcgcgtgcactgagtaactgaaagagagggaaaaccagctaaactaatgccacttcaaataaaaaataaaggagacaaaagtgcaaaaaaataagtactttgtttcatattataagtcattttgacctttttaaagtaaaactttttgaaagtttgatcaaatttatagaaaaatatagcaacatttatagcaccaaagtagtcttattaaatctaacattgaatatattttgatagtttctttgttttgtgttgaaaatattgctatatttttctataaatttagtcaaagttaaagaagtttgatttagagaaaagtcaaaacgacttataatatgaaacggaggtagtacaatttatcaggtcatgcatacaaattgtaaaaaacaaaatatgaagttgtacctgtcttggcctctcaatttagtatcttatcaaattatttcttaaattctatatcaatatttagcaagctgtaactgacatgaactcttcttttaatccagaccattataattcagttgcacctagatggatgtccagatttatttactatttctctgattggcatgggaatttcctcagtgtgcaaatattggcaagatatatgagttccatattccacttgctgttgaaggctaagccttccaaactgagtttgctttagaacaatatgatgttaggaacagaagtgactactgaatctacccatgatttcaacctatcagattcatgcaaaatgcatcaaacctatacaactttctccaaacaggtccacgtgtgtagcaaaaaatcatgtgatgactgtaagtttgctttattttacagtgtttcattttcctttgttatgtcccaatgaaatatgcagcaatttctgttgttttacctttcttctgagagaagattctggcaatgcaagttcctgagctcgctgttctctggccttgttcctcctttcaatgtcattgttggtcttgcggagtagaaaccatctaaacaacggtattgcaaaaaaggaaccagcatatacctacaaagggccacatgttatcagtaatcagtatatcatcaatgcattcatcatacattcacaacataatacaaccaacagtttgcacattatgactttcagatgttcccctcacaaaaccaagggttcatgattgatttcaaccaggtgcttttcaacatgactataaagatcaagggattacaacttttatgcaactaaataggccgcatagagcccagccatacctgaagcaaaggaaacagttgcgcaacaaatgagataagtccaccaggtggcactgtcatttgcctacaaaacaaagtttaatgtaaaaaattagtaaaagtgaattacaattcaatggtatttgagggcagaatcacaattcctacttcaacaggttcccaagaatgatcacaccaaaaagattgagtcctcccaaaccagcaaccattgccctttcagatgcatttgctttgctgcaaaacgacaacaccacatatgaatatacagaggtacaagacaaactgcagatttcaaaaataacaaattgatgcaattaccctctaatgcatcaatacagacaattctcggctccaatgcagtgcattccatagtgtactaatgtgtgacttgattccaagaaaaaataaatttacaatccaaacacaagtacatgcacattatagggtaacaaaacacccttaagttagattttggcatcagactgaacaaatatttccttgaattgaaccaaaatggaccaaatagatagaggtagtgcatggtagagagctgcacaagttaggatgacgaggtagatgagctaaaggcaggaattggaaataatggagcttcatttgtcatttgatctgaagtcacagagggtgatgcggacagctttgatagttcgcagttgtgttttaggcagcttggggtatattttaggacctaggccaaagtacaatgttggaaggtagaacaggttccactagagttaaatgcaataacagggaaactacttgaataactcaatgacaaaaaaatgctaacctgaatttccatggtttctcctctaagtacttttcaacactgctaaacatagcagaccatttgttaccaacatattctctaaccccacttccttttgatgaagcagtacgttgcagtgatggaaacctataaagaatgtttccctgaatacaaaaacaacatcaaaatacactataagttgatcagttcaatcaagatgcattcaagttcactaccagttatgtaatgccaccttcagtaagtggtgggattgatggtgtaaacattaagaacaatgtagggatatgtcttagtggcagtcaatatatgcttaaattatgagaagaaagatggacctgttcatcaacttctgggtgtccctggaagcgtaatagaactggaagaataaatgattcatcatcctgtagttcagaatatcatatgcatatgatgagatgaggcttcacgccaacgaacaatccataacttacatggaaaattcatcacagtatttaatttatttagtaatgaatggaaaagtacaaaaaaaaccaataacaacaagaagaatactaataagcattttagaacagaagttatataccttggattgttctgaaattggtggcacatcaagatacggtgctagttcttctgccgtgacaactccaccattcgatgaaatatattgcccaatctgtatatttattcaaggagaagttagaattttgtaacagtacaaactagtaacaaataagagctgatcatgatagttagaaacagaaacagctatatggcctatgaaaagcttttaccatcttccacctcttatcttcaagaccatcatttggatcaccatctccaaatacaaatgaaaagatctgcataattgatttatgaacataaagttaacccacctacacatgacagaattacaccaaggaaatgaaatatcaagtcaaacccttttaaattacagattcaataaaattcatcccatcttccttttctacccgccgccgcctcctgtagtaatcagcgtccaagtacctgttgaagacatatgaaatattattgtgaacgactgaacgatagcaatgtgtacaaactacaaaattaaaagtattcacggtgcaaaatcaaagattgcattaacagctggatgatttagtatcatttttcatgcagtccctacataagagttattttcatgttgatttacgcatgctatgcatagtgaatgcataaaatacaactaacacatatgcatgagtatgactacgtttaaattgattgtatttttgccagagcatttattctgagatggttcgtttcagaagaaatactagcacaacagttggcacagagcccaggcaattttcaaccataaatgtgcaatagccgatgaagtttagcaaccccccaaacgcaaaagtagatggacattataattgtttgtgttccttcgcccaagaatgcactaagataatccagctatgttgaaactcgtcctaaagtgacaggagacttaccaaaataaatctgttggtatgatgatagtagagtcataggatctccgtcgcctgccgcgattatcttcatcactgatacaataagaagtgttatcactggactggaaataagcaaatgacagtatctctactaatgtccccaaatatatagaaacaactaataatggctaaatcttagactatagagtgagattttttattctgaattacatatttatggatggaattgaggagaacggttgataaatatgaagacattgtgcctgaattgctttgagtagaatagagtatagtaattaattaactgaaaatccatctggttatactaagcccacctcgagcttgagataatggcaatgatggtagtgtatacaagcacaatggaggcgatgagcgctgtcccaaatgacactcgcaccaaatatgcacccacttcctgcgaaaagttacagaaagaaaattcacaactgagccaacaaaatgactcgcgcaatttttatcaataaactttttgtttcatctctccagcagtccagcaccttagttttgtcgatcagcggctcgaccttcattctgaacgacttgccagcaagcttcgccctgtagtctttagggaagacgtacagcacctccccttcctccgagacctacacaagtcgcaaccgcttcatgcttagacagccacaaaaggcacggaggttagcaaaaccaaggacgcggtgacaacggagtacttagcagagctaaggaggcgcacctccaggaagccgccggtgtcagcggcgagcgcttgcagcgcgcgctcggcctgcgcgagctgcagccccgcgcgggacgcgacgtcgccgatggtgacgcggccgccgaagtggtcgacggcctccatggcgcggtcgcgcacgccggaggggaggcggtcggtctccacggcgccgccggggcgcgcgagccccggcgcctggatggtccccgcgcgggccctcacgtcgtggcgccaccgcggcgacggcgggtgcgggtgccggccgtggtggtggtgggcgacgcggaggtggaggtggaggtggtggtggtagggagagagggggaggaaaggggcgtggcgcggcggcctgccgcggcggtgaggcggcgggggcggggcgaggcggaggtggagggagagggaggcggcgggcgccatgggtggggggaggtggtggtgggggtttagggcgaggtgggcattctccggtgagaggagtggctgtggaaggcggaagggaaaggggggagagaggcggtggtgtgtgctggccgtggccacgagatcggatttggtctctctgaccggtggatttctgggtcggtctcgttcatggcctgcactagctaggcacgttaagttcaagctcagcaataacgctaagcaaaattgggtgaaaacagatcgaataaagttagttagacacagataatagacaaaatggatgatcaaaagttcaaaacactagaaaaatatcaaaagtattgggttgagtgattagagagaaaaaaaacacggtttacaaagacacttgtaagactattgctccctccatttcaggtgagaattttcagaatataccacaatatgcactgcttttaggatttgtcacccaattcgtactactttcagaatacaccactagagtgtgaattttcttcgtttcgtgccactccgtccacccaaagacgtgcgtcgtcagttcatccatctcgtgccatttgcctgcacgaatttggccgccggcgagctcgtcctcccccacgcgtcgtttgccctcacgcatctggcgagctcgctcgtgttgtccccgagctcagccgccgccgcaccgggctgtcgccactgcgccctcgagccaccggagctcgacgccctccgccctccactgctattcctctctcctccgggcctctcccgcgtgcgccgatggtggcgacggacagtcgacggtgcaactgacgcgggcacgacggacgagcgatgacggggctgacgccggcggcgacggacgggcgacggctgggctgacgcaggcgcgagcagcggcggactgacgacggcggcgccaggaggacggaggacgacggcagcgccaagaggacggaggacgacggcgcgattgacgctaggggacagagtggtacggaataaagaaaatccgcactccagtggtgtattctgaaagtagtgcgaattgggggacaaatcctgaaagcaatgcgtgttgggtggtatattctgaaaattctcattttaggttgcaagacgttttgactttggtcaaagtcaaattgttttaagtttgactaagtttatagataaatatagtaatatttataatactaaattagtttcatcaaatcaataattaaatatattttcataataaatttgtcttaggttgaaaatgttactactttttctacaaacttggttaaacttaaagtagtttgactttgactaaagttaaaacgttagataattttggtcgacatgacgaatgtgttcggccaattcgcggtagcatatagaaaatccattatctaaaaagaattgcagtagcaactcgaaactttaagaaggatagtaccaagtaacagatgaattatttatgagatggataaaatgcagtaaaaaaaacacagcaacgatttctttttttaatggtgaatgttatgacaatgttagtcccaatcaagctacatcttgataatgaatctaatgtattggtttgtttaattttttgtatgtatacaaaaaggttgtgtattgtattgttctcgtatgtgtgtacattccagttttactattttgattagttggttattgtttattggctagtaacatgatatgcagtagtaatattcaaactaactatggatatactttttatgtagtgcattaagttaatgaatcagattgagcggactgttatcttctttatttactcatatgctttctgtttgtaagttatctcaagaaaatcaaatgatatatccatagtgatggactaattatattttttttaagtgatgaacgtattgcatatactgagagtctatacatagaataatgattgttttgttcatcttttttaaagatataaattttacgttaacttccgttattcatatttttaaactgctaaacggtacattttttttaaaaaaaaactttctataaatcatcattttaaaatatcaaataaatttatttttaaaatttataataattaaagctcaattaatcttgcgttcatctttcattttaatctatctcaaacaccacgaatcatactttgtctttcaatcgttcgcatcaagaaccagaaccaggttcttgcagcggcagctaaaagggggggtttttaactatttgccactcttacggagtgccactcttgagatgccactctttcaaatttttttaaagaattaccataagagagagaattaatctttataaatgaccaaatttgcctaagtggagggctacctcagctctgtcaacatgaaagcggatgtctaatgactctttggcccttggtttaaacattgtaatagctgactataaccaaatatttgagcaacatttgagattatatacaaacgtatctaaaaatatggtttatcattttttaaaaaatagtttataatgggcaaatgttcagtaatttgaataagttcaccataatataataatagattcaacgaggtcatatccgtatagaaataaaccatcacactagtttatagaatatatcagttcatattgaaatagaagtcataggatcattagtccagtacatctgatctgagaactactgaactagtgtggatggtctagctcatggatgtaaccatgtagaaatgtagaatccattatttttattatggtgaactggttcaaactactgatttttttcctatgataaacccttttttaatagatagtattttttttaagatacgtttgtatataatttcccaaatgttactcaaatatttggtgtacaagagtacatggtcaaaccaagggtacaagagtcatttgaatttagctttcacgctggcaaaactgacatggccctccacttaggtaaatttgatcatttgtaaagattaattctctttcttgtggtaattctgtaaaaaaaaagttagaagagtggcatctcaagagtgccactccgtaagagtggcaaatagttaaaaacgccgctaaaaggaagggagcgtattctatgcacacaggccctcgcgtgtacacaccgtgtacaccaactaaaaattatcacaaaaaattctaggaaaattcatacatgtactttcaatagtattacatctacgtgcaaagtcgcatcttcaaattcattctacatagagaataacaaaaaagataaaattctgacaaaattgcaaccttaaaactgtcagattttttgttttttttgttacagctaaaatataatgaatttgacgttaagattttaaccctaagtgtaatacaactgaaagtatgtgtatgattttttctagattttttggtgatattttttagttggtgtgcacgtgtatatacacgtgagagcctgtgtgcataggatatgttgcgtaaaaggaatccaccatttgggttcttcccggggtaaaatatcggcccctcgttccctttcggccacgtcaccatctccccttccgaacagcttgccgccaccaccacaccacgccgctcgccgccctcgcggcttcctgccatccgcgacacgcttctcccgcaccgccgcacaccgtcaaaaaaatatcggcgggcgccgcgcaaagcgacctcctccccccttcacctgcgcgcgcgccgacgaggacacagtagcggccagccacccacacagccaccgcgccggagaacgggctaagcaatggcgctcctgtgctccgcctcggcgcggccgccgctcgccgccggagcccgtggccggcgccccgcgcggggggcggcccgcgtcatcggcggcggcggcggcgcggaggcgcgcgcgtcgctggtgctggcgctcgccgcgcaggccctcgccgcctcgcagcgccgggcggccggcctcgccgcggaggccgtcaagtacgcgttcccgccgcgccgcttcgagccccgcaccctcgaggaggccctcatgtctggtcggtggtgatgattccgccgccgttggtgatccattctcgcccagagcctctcaggctggctctcaggggtttgtggtttgctttactgacattgaatgtgctctcgcagtgcccgatctcgagaccgtccccttccgcgtcctcaagcgcgaggcggagtacgagatcagagaagtggaggtgaccatttgttttccatccatcgaattgtttgttttataggacaatgttaattgggaattacgcgtctattgaaaatggaatcaattattctattacatgatatcaactgccttcttgtaaatcttgaccagtcctactatgtcgctgagacgacaatgcctggaagaagcggattcgatttcaatggatcatcccagtcattcaacgtgctggcgtcttacttatttggtaaggtagttgatacagttccaccctgggtcagagtttcttcctattgttccattgactaattgaattgaacgggaaattgttagagggattattattaatggtatatatgcttttgcctctagaacacgacttctgagcaaatggaaatgacaacccctgtttttactcggaagggtgaacccgatggtgaaaagatggacatgaccacaccagttataacaaagaaggtgggtgggttctgtatgttattcccatgagacattgttctgatttgtcacttctagtgattatggagtcagggtcttagcatgtatatgttgagaagttatgcatcccatttaatcgatgctgtcatttgcagtcagctaatgaaaacaagtggaagatgtcctttgtgatgccatcaaaatatggtccagacctgccactgccaaaagacccttctgtgaccatcaaggaggtgcccgccaaaatcgtagcagttgcagccttttcaggtcctaatttcatattctcagttttgtttgtgtacccatttcaacatgagcaatgctacacgtactaaatttttcttactaaacttttactaacaatcatctgaaccgtttgatttaagtagatggaagttacaaaaaatctagatgcactcatagcatgacacatcagtgttagtaagaatttagtaaaaaaaagttagtacgtatagccttttcctttcaacattgggatctcgatatgatttttgtcgcatttgcttatgaacctatttgtttttctaaaaatagcaatcttctgcttattggcactgccgttttcacatttgtaacctttccatttcctctgctactttaaaagcacaggtgtcgtccttcctttccctcccccaatcccacgtatgaaaaaccactccaaaaaaaatccagtgcaactaaaaaactagccaacagacaaaaaaaaaaacacattccccagatcccattgcaagggttgaaaagattgagccatgttcccatatcccgttgcaatgcacgggcacatgactagtaatgataaaagcttacctcttatccatcatgtgttctctggagaaatgcataattgaaactgatgagtttgcacagagcgacttgcatcattaattgtactatgtggttccatctgggaattattgtctgatgtaaattgtattgttgtttcccatattcgtactaatcatcaaaacaatctgtaatattagcttttccgttattataaaaaataaaaaaaataccttttctttttcaagtaatgagaccagaacaaggttcacccacttacattatcatcttatcagaaataatttagactttatgtttgattatgttttcaacatactacaaaatcacccaaaattcgatatacattacccctgttattttcaactttccttctcagtacagaaagtttgaaaatggcatgcatctctcatggtatttattatgttttgagctaaaggttaactctctttctttctgctaaagtaatataagttttatagatattgaaaacaccttgaaaacgttctttgttggttcgagaggatacgcaattatgtacattatgcactcctgccaaaatggcaatcatccactacactgacaagtcatcttttatactctatttgctgtaaaacaggtctggttacagatgatgacataagccagagggaatccagattgcgggaaactctccaaaaggactctcaatttcgggtgaaagatgattcagtggtagaaattgctcaggtaaatcttgctcaaaataattgatcaatattctaatgtcctacataaataagattgatcattgactgatcctgggttttactgaatctgcagtataatccccctttcacacttccattcacaaggcgtaatgaaatagcattggaggttaagaggcttgatgcaaacttctgatgacctagattaacaaataagttattagatttcagtgtatataaaaatgcacgcacctacaaatttagaatttcaatcttctctttgctcatattgtatatacatatgtatcgtgtatcagacacaaatttacatgattgtaaaattgaatgttgaagtatcatagttcattttgatattttaatttgtgtatggtattttttagcatagaaggccatcctgtcttaagatctctgtcacaaagctaaagtagacctttttttcctcgtacaacttttgtaccaaacctagaaagtcttttttacagaaataatgcgttcagcagagttttgagcctgccatatttgacactgatgggcatattttcaccaatttagcatgtagtacatgggagcatcagtaacagtaggatatatcattaattcattatggagttcttgaaggttcttagattggttctttaagctggattctgttttggactctgaacttgtaaagctgtgatctttatgcagaaattaagcaaaggggatatattctatcatagtatcatctaatgatttggcttgtcacttacatttacaggtgatatattccttatatgcgttcctatttccttgtttttatcgtgaactagcataaacaattcgcctaattgttgtcctagttggtttttcattttgtgtgcgtgtgcacgtttgtgtggggaaggtgtttgccgttcactggtcatgggcatatctgtacataggatgcttttctcttggcatgattttataatattctcttagttggcatcttggagatgagtcccactcatctttatatagtataaggtgctgaggtgtgaatgtgtgattatcagcatagccgagatcaatttcgaggtagtaaagtgacctacattgtttttatcagttaaatttataactgcttagaacagttgtcttattttacgtctgttacagaagttatgctatttgatggagctggcactggacaagactgaggaattgatgcattcatcctgtgatgctacaaagaggaccttgctattttctaattactgaaagggcaaggccactcgggatcaacacatcaacatctctgaactggtctacttgtctctgcaggtaggaggaagctagctcgtaaaaataccacaacaggccctatatatctgtgctctccacttgtggcgagagagcaaaactgcaagtacttctatagttccttgcacctaatgatatgagtttatatttctgaacagaggatcaaatgataaatggggactgctaagaaaagtgcaatctttgttgcactgctgtgcactcacattcttgtgaaccatgcatgtgacagtggtaagaattctgtttatccttcttttgcatttttcctcagctagtctattgttttgttgtttagtttatcttatgatatgtgatttgttgaccatccatgtgacaatggcacagatttttgctctcccgaggactacaacagaacaactttgtccctcaaacttatttttttcttatttttttatagtttttcagcttgtggcgaccttttctttactcggactagagatgcatttacccctttacctctcagttcttcctttgattctttaataactacaattttgatatttatattgaatggaagaaagtcaagataaaaaagtcacaaaatctcataaaaatggaaaaacaattcaaattcctcagtcataccaaatattataatcattgtagaatatcagatatcaaactggatgatccaaagataataaaactcagtggaaactggatggatcattgttacgagtaattttcctgaaacaccttatttctgatatctcatatctgatctgtattgcctttacctgaagcagatgtggtatttgggtacagtgggagtactggtccagagcattgggggagcttaagtcctaatttcacaacgtgctcaaaagggacgtaccagtccccaatcaacattttgaaagatgacgcagtttacaacccaaagttggagccccttgaaatggattatactgctgcaaacactaccattgttgacaatgtcttcaatattgcggtttgatctaaaacagatggttatttgtgttaacaaagaaaatgtgtagatgcaagaataatactcctagtcaattctttctaggagaatatatgattgttttaatatgctgtcaattacttactcattcattctttgaattatccattcatgctgttctttctgccactagtgcatatggattaatactctttgaattaatactctgttcattctttgaattaatagtcttatccattcatgctgctgtttccgccactagtgcatatggatttgatctccaatctattataactataataataaatttactacaaaatggaaatatgctttgtccaactttgtctacgccatcacctattcaagtagagggtatgtaaattcaaaatcatctgggtttaaattgtggttgattgatgtagctacgttacaacgacactgctgggactgtgaaggtggatgggaaaaagtataaactgaggcaattgcattggcactctccctcagagcacaccatcaatggccaaaggtatccatgcacaatgctgcatacaacctggtgcattgtgaatcatggttatctgttattctaattgtgtggaccatgtcatatcatgataggtttgcagtggagctccacatggttcaccattctgatgatggcaacattactgtcattgcagtcctttatcgacatgggaaacctgatccatttctttttcaggtgaatttttgtgacaccctgataggacatagtactcgctataatgatcaaaacactgtactctgtaggactctaaaaatcagatcccccacttcaatcaactaaagtccttttccattttaagttttaacccttttttttttggcatagatcagattagcaggctgtcctcagtactgactagatattgtatccttcagacataggagtaggcttgagaacaataacctgctcacagctggaattgatgccattaaaatgtgtactatctatgaagcagatcaacactgtcgcctggcgttttttttttttgacatcattggattacctttctcatatactacacctcataatcagcatatgcatactttagctatttgctatgttggtgtcttggtgacatgcagataaaggataagttggctgcattatacttagagggctgtaaagcggagaaaggcgaacctcttcctgttggactcgtggatatgagggaattgaagaaaggcgcggataggtatttcagatacgttggatccctcacgacacctccatgcaccgaaaatgttatctggaacatttttggagaggtactattccccttgcagagtaatagaaacatcatgaaaacttcgtagtgagttatgtttttatactcactggcgcttctaattttgcagataagagaaatgaccaaagagcaggctgctgctttgagggcccctttgcacgggagttacaggcacaaccgcaggccgacacagccactcaatggtcgcaccgtgcagctcaattacatgtaaccccataacggtaatccaaaagatgctttatcctgcggcagctcatctatctgcagataataatgtgctttagtatgtacccaagttcaggaatgtcaatgtaatcggcgccatggactgcaataaaaccttgttcattgtcatggttcacatcattcatttttcttttgtgagaagtctccgaaagggagataacggcatggatgcagggaagacgaagaccctgaatgtatgaattctatgcataggaagacagcggcatcgagggaggacatgaccatgacctcataggaattgtttgatcttctttttaattgaaatgaagtgaggaatttagaatggaatagaagcaggttcgcttaactgttaatcacttgcaaatggaggaatttatcccttatggcttcttgttgctgcctgttctagacgaggagaactgggaccattcacattaatttagcaatcagcattagcaaatcagtaaggttctcttaagaaataagcaactgcaggatattgattagggcattaggaatatgtccatgacgtgctcctcatacgaaattacgaaagtatggatgaaaacgaaccgcaataagcttcaatatgatatcctgatccagtactctaatgtactctctctccatcgcacagaagtattttttttagtgtttaaaatttatcccacaaaacgtttggttatttggaggtgttcaccaatggcaataaaatcctgcttaggataactaaaaggcaccacaaattaggcggatttgaaggaggacatcaacgtctttacaccatgatgtgatgttaatatgtgtgagattttctaaaaatcaactctttgtgtgatggatggagcattcgaggataaacattcaatcaattctttgtgggacagataagagtattaaaatgaagatatgccaaagtgtttaaagaaaaggagaaaaaaaagaaaatataagcatgccaaagttttagggattagaggatagaccactcaactcaacgagattaggggaaaaaaataaaaaggcaattaactaagcatgacaaagtttggaaaaggaaattagggaaaagggaaaaaaatatacatgttaaagtttcaaaagggggaattagggaaaaagaagaaaaattgaagtcaaagtttcagaaatgaaattaggaaaaaaaatagaagaaaaaagacatgtcaaaggttaaaaaaggatattagcaaaaaaaataaaaatgtcaaagtttcaaaaatgaaattagggaaaaaattaaaatgaaaattaggggaaaattttaaaaataaatgaaattagggaaaaaattaaaatgaaaattaggggaaaattttaaaaaaaataacaataagggcccatccgggttcgaaccggagacctcttgatctgcagtcaaatgctctaccactgagctatggaccctttgctgaatttattttggattttagtttactcaaagaaatttaatggcagtcttttctaattattgtgagatggtgatataatcaatgcaaatttcataaggtcactgtcactatactaaatagagcctatatttcttccatgacgactgcgcttacgcttgagagtggacttgatccttatccaaaaaggacaaacagaaacgcacgcacacaaaaacaagagaaaaggagccacctgaatcgaaacacagccgccagatcgcctcaaaaacaaagagaaaattccacgcgtgaagcgtttagactcgtgtccatcgatattgcggcgcgaaaagcaccgggcgtcctcctcccttcaacaaactacaaactacagtatgtatactattagagcaggtttaataatagcgcctgcggctggcgataattttttccacgtcagttagaatcaaactaatagctaacatgcacaataaataaactgtaacatatctgctcatcaatttatagatactattttcttctttaattatcttaccctctctcttcctttacttttctcgaccaatgactgtgattatcagcctctgtagtgcatagcagcgggcccacttctctcgggttgtgcgtgtagcccggcgactgtttagtcgccgacttatcccatttttgctcttctctccgcgccagctcagcatccaagccaacgtggcatttttatcgctggctttcatagcttattgcacctgttcttactagctcgtggaatacaggaatagcctcgtactatacaggaataaatgccattagcaaattcaacattagtcggccggtccactcattgaatagcttcgagtgtttcaagaaatgagtatatatcgcatttaagctctaaagtttaaaacggtgacataggctgtgtttagttggatccaaagtttggattttggttgaaattggagatgatgtgactaaaaagttgtgtgtgtatgataggttgatgtgatggaaaaggactgaagtttggatccaaactttggatctaaacacagccatagcttagaatataattgttgcaagtcattatatatataggacgagcgcgagattttgaaaagcagctaatgaggaggtatctgctgagtatatggaaaatgtggttttcctaagtttttagttatcttttcagattctgtttagaatatgggtgagagtatgaattatttgagatatcttgagtttctaggagaacctgtaattgcgaaaagcttctccgaaatctgtacatggctatagttagactatccaatgatcactagttacttcgtcggttatgacagaaggtagatgaactttcatcattgttgttttagctatggcaaagcaaatagatttagcaaagttcattcaattacaaattttagcattgatgctagtaaatatctttaaaaaatattgttggccaacatagaataactcatacaaaatcgacaattatttgtagacggagaaaccaagtttaattggtttcaacaatggagcatgacatctatcagtgttgagcctgcgcagctaccgtacgtacaagtaactaatctggtttaaaaatttgtgatatatcatgtcaacaaattatttactccctccgtcctattttaagtgtagccatgagttttcgtgtccaactttgatcgtccgccttatctgaaatatttttgtaattaatatttttattgttatgaatagtactttactcgtgacttatgtttttaaatttttttcaaataagacagacgatcaaaattggacgtggaaaaccatggttgcacttaaaatgggactgagggagtaccacataagcaggaacatattttagctaagtgagttaacgagtgagtggctggatagataaaaaaggcccccgcgttgccccacgcaggtgacacggccgtagcctaccttagtccccaccaccccttcgaccctcctcctccacttcgctgccacttgagggaccaagcgaaaaccgtacgacgaattaggatggctgcgatgggggcaaaagcgcaatccaatgcccagatctggcgcggagaaacgaggaaaaggcacaatggtgcattggcgaggagtcttggtgcggtggatagggtcaccaaagtggagcagtggcgtgttggggcagctgagatagagcgcgacggaaggtcatgactaggcctcctctgcgggcttggtggctagatttatatggatctggcatcccctcttaatcggctagagcaacacgagcaacaggcgggttgctatggcggcattagttttctggcatggatggaggccgtcaatattcatgcaaagggtttcggtgacaatgggcaaggtggaggttggtgcctataaggacgggcatgggcagagcatactagcatagtgaagtggatactatatgggatggagctgtccaacggcgaggagttgcacagtcagtgtcttgtcaaggaggctgagtcaatggtgaaggcatggagatcatcaaggagtaacagtggccggaggtggccgcaagaagtgggaggtggcacctgttgggtcgcacggggagacaaccgtcgggctgaacgatgaggaggtgatgggtgatgtgacttcaactcaagatggcagctcgatcagtcgtcacaacaggcacaattggtggatcagatggtgacggggtggttctctcttccatctgctaggcctcctccctctccttgagggcaagtactataagcctctacacacttgctcctgggtgccatgtaaactcacatgatgaggtggatgagagaaatgaagagagagagatgatgagccacctcttatgcaagaggcaatctctattcaaactccaaaagagatgagatcaagaggtcaataaattaataggaaacaaataaagtaaatttaatatggtgtattgggacaagtgtgctagaggtaatttattgtatatattgactcttaattaatgagttgatgatgtgaataagattgggaggctattagagcgagtacaataataggctacaagtcagctgtaagcacatgtggagtagagaagagaagagagagaaggaaagcgggctacagattcgtagccaactgcagcacaaactccaatatgtcgtgtgtacgagaggtgggaccatatattaatagtgtagtatatggttatagataactattgtatgaataagctattagattggatacagatgaattagagctaatagttggttgtactgttaaatttgctcttatcacccctactttaaaactttgctctgtaggtgttccccctctattgggagaaaattgacatttagccatattcaggatggggtttcgctggaatgccactcccgaatatggcttcgttataatgccattgtcaaatgaagccaacgtgctataatgccatttcaaccattttaactgatttccaaatgttttccatcattctctgacatatttgcccctagtcattttgttgactttgcaggggaaaggagaaaggggatcgatccccatccagtcgccggcggtggagcgtagcggcggcggctgcggcgacggggcatagctgcgagttggtggtcgccggctcctcgtcctcatcaccaccaccacgccaacatccgtcggctcgccgtgggcatgacggagagggcgaggagagaggagcggagctcgccgtgcgcgcgacggaggcgacgaacgtggtgaagtggtggggagttgcgggagggaggcataggggacgccggcgaggcactcgaggaggaggtcgtcgaggaggatggagatgggggtcggcgatgaggtgggcggtgccggcgtggctggcgacggggacggcgccgacgtgggttggggaaggctgctcggctcagcggcgccatctgcatcggcgtaggagaacatcccaccagccccaaccatgtcggcgccgccgccgtccccgttcctagccatgtcgccaccgtccccgtccccagccatgtcgtcgccttcccgtccccagccgcgtcgccaccgtccccgtccgcaccgctgccttccccatccccaggcgcgccgccgccttccccgtctccggccgcgccgccgccgtccccgtctctagctgcgctgccgagccgaacggagaggaggaagacagaccgagccgaacggagaggaggaagacagagaggagagatgagataggatcaagggtattttggtcatctcaacaagaaaaaacattacaaaaaacattaaactgagaagaaatggatggaatggcattgcaacaagttacccctgtttgagggtggcattttaacgaaaccacttttgggagtggcatttcagcgaaaccccgttttgagaatggctaaatgtcaattttctcctctattggagggtgttcagacatccgttgcgaataaacatgaactcttgtcttcctcctcctagaatttaccttaaaaaagattagccaagtgaggtagtaattcaaacttcccttccatctatttatcgtgcagagtactcgatgcaaaaaaaacaagcagaaaataacacggcttggaatctcggggaacgaattaaacaaacgccattagcttccaaattaagcgacaatccaaccaacccgtcctgtcactggcactgtcactgccgccgtgccaccgtttttcaaatccccatctccaaaccattggcgcctcccatcacacccgcaaattacccattctacccctccattcctcacctcatctcacccctcttcaaaaccaaacctccatcaagtcttcgtctacatcacacactacacaaccaaagaaagaaagaaaagcgagatgccaccgcttactctcgattccctcttgcacggcggcggcggcgagccggaggacgagtgcgaagacgagttctccggttccgacgacgacggcgaggacggtggcggtggttctgaggaatggggcggcgacgttgatggcgagtatgacccgtactccccagcggagtcgctgtggctcaggatcggggaggacatcgactggagcgaggtcggggcggtgctggagcgggaggactccaccaagggcgcctccaaccccaagtcggccgcggcctgcagctgcgccggcgcgccggcggcgaggatgccgacgtgcgccggcggaggcgggacggcgaaggcggtcgtcatcgcggggctgcccgcggcggcgcggaaggcctcgcgggagcacgagcggcggcggcggctcggccgcgcccgagcccgcgcgcgggtgttcgccggggacgccgtggaggtggcggagcccgggtcgcccaaggtgtcctgcctcggcggcgtccggtcgcgggcgcgggcgcagcagccgtgctgtcccgccgcggcagctgcggggaggcggcggtggtggtgcgcgccgtggttggtgagcgccgcgtgccgccggtgctggagcgccccgccaccgcgcgtgtaggtacggtggtggttgccggtggaagcaaaggtgaggcgtcgccgtcgagttcagaggcaatttggcgaaggcgacgccgcgacggcggacggcggggtcaggggtcgtgcaaccacgtacgcgacggctgaccggcgaaacgtacagtttggtcaggaattgtgggcccacctcctcgatgaatgtctatctgctttaagttccctgtgactgtacgtgaaagctgagtacggtggccgttcaaattggaattccaatgggcctcgatccatatgcctctccaatgtcacgctctgttttgttcatcttttgtgctaaatgtttcccaaatgttgctgtacaaatgcattgatacgaaattacagaaagaggtgcacataatacgccgccttatcacgagaaatatttgcatatatgtcattgtaaaaaagttggcttcgttcatatgcatcacttaaatgagcttagaaaaaatatcactctcaatcgaggagtcttcgttgaaatgtcatcctgaactattttgtcattggcctttttctttctcccttcgacacagacctcccttcgacacataaaaagctcatcggcagccaccgcaagctcaataccatgttaggaccttgtttgtaatatgaaggaagcattatattcggtataacggttaataaatataattaaaactcaaccataagggacggaaagttgtcattttcttatttttggtctttgttatgcatagtggctcgatagtacggcccatttagaagacgagaagttactactacaccatccgtttatattataagtcgtttgacttttttctaatcatttttttttcaaactttgatcaagtttgtaaaaaatatactaattttttaaatacaaaataggcatattattaaaatatatcaatgttaaatttaatggaactagtttagtaatcgtagatgttgctattttttttataaattcgatggtacctaaactgactaaaaaaaatcaacgtcttataaaaaaacggacgagcgaaaaaaccggacgagcgagaaaaaaaaaccgtaaatgtctgataaaaaaaagggcgaaaaaataatccgattgcgtgtcaaaaaagcgaaaaaaaatctctatctctatctctgtctctactacttaaaaaataataaaagatgtttccatcgtctgtaaaaaatagctaaaaaaaataaaaaaaggtctgactcctatccgattccctctcagaaacagaaaaaaagtccgactatagatccgattcttaatctataccgtgatatcttacacatcttggtgaaacaaaatgatgagcaagattaaagatctgtttaataaaacagaacctacaggtcgagagcattccatttttatatgattttaatttttgggtttgtacttttgcttttgagtccctataatttttatatttacatttgagttcctataatcttgcaataaagtacttgaggtcgtttttgttaaaaataataataaaagagagaacaaaagcagaaaagtgcataaaaagaaaaggaaagctgcaaaaaaaaggaaaacaacaacaacaaaaaaagttccgtttcccctatgtggcaaaaaaaaccgtagatctgaacgaaaaaaaatacgattcctataaaaggtaaaaaaaagtgaaaaaaatgctagattcgattcctttaaaaacaggaaaaaaagtcggattcctataaaggcgaaaaaaaacagaaaaaaaatcttaaaaagtttgtccaattccctaagaaagtggcgaaaaaaatggtttgtaaaaaatagaacgcttgttcgtataaaataaaaaatacacacatgaaaaaaaaaatagaaagggcgaaatttctaatcaatatatatctctactctatctctaatataatctaactatttttaaaaaaaatgcacgagagaataaaaacggttcaaacaaacgcgtgagaaaaaagtcagaaaaaagcaaaaaaaacacgctaaaaaggttttccatcttccataaaaaaaataaaaaaacgcgcgagaaaaattatttccatcgtcggtaacttttttaaaaaataaaacatgcgaggaaaaaactgtcagaaaaaacgcgccattttaaccaatggttttaaaaaaaccgcacaagaaaaaaacaccgtctattaaaaaaatcgctctgagtcggataggatccatcgattttttgccatctactacacggcttttatttcgtctatattctcttgtttttaaaaaaagcaacaaaaataacatttgaaaaaaaacaagcaaaaaaacacgcgagaaaataattggcaaaaaaaggcaaaaaacacacgagaaaagaaaagcaaaaaatggagaaaaatatggttttcgttataaagaaaaaagcaaaaagatcttgttagaaaaaaaaacttttagaaagaaatgcgtcatttctgaatggtttgagaaaatcgcacaagaaaaaaaacaccgtttgtataaaaacaagccgctcattaaaatacaaactcattaaaatacaaacattgccattgacataattattcatgaaaaacgtatattatcattagaattttttcacccgttgcaacgcacttgcatttttgctagtaacatataaaacgagggagtacctctcgcggtaagtactttttgtataacggcctttccggctgttgcaaaaaagggcggctttttttctgaaaaaaaaacctactcaaaagctgctcttagaaaaaaactgatccagccgtcaaaccggcaatcactcaatagattagcactcagagcaatctctcattatccaccattatttatgtagtttcaactgaacattcacacaagttcgaaaaagacatctggaatttacactggcatatatgatgcgtcacaacacaagcaggtacatttcccttttacagagtagctcctactaattcacatcagtaaaataaacacaccccaggggcatgctgttatttatttcttgactcctttcccactgtacagaaaaaaactttaaaagagtacttagctactagtatctgcgaatcaacatatcagaagcattcaaacagaacaccagcaccggatcgtgtgattgatcatcagtttcactgtcacccagcggatcaggttgggcgagcttccccgcccttctgcaatcagccgcgaaaaaacacaagcagaccgtgtggatcagttcatcattcattcataacccagaaattaaccaaatactcctaagttggaggagatcaagaccggctaattggtttgtttttaatttcaccttatcccctttggcggcggccgccctcttcgctgcatcggccttgtccttgtccgccttcctcctctccttctccagcttctccctctccatcttctgctccaccaaatcatgatcaaattcgacattcaaacgtcgtcagtcacaaacagcagtagcgatcaatgatcaggtgaccaccaacctgtatgtagacgctctcggcggcgcgctcctcctcgctgagcaccctgccggtgccgtcgctgaagtagcgcgccacgcgccggcctccctccatcctcctcgccaaaactgccgccgcccacgcgggttgatgaggcgccaccaccctcgccacggccgttcttgtagccatcttcttcttgctccccaagaacgtcttcttcttcctcttcttgctccccaagagtagagtacgacgacgacgcgtggatgatgactcgcgaatcgcgatccctctcgggagcttgccgacctcgacgtgggggcggggcgcccacctatttctagttaggtttttcactttgtcagtgtccgtcggatgctctcatcctgaccattttgcggcgcgaaaccgaagataaggatgggaatatgggattgagatgagaacgccggaactaaccggataaaagaaagaaagccaagtggtttggaaagcaactcgagtagtctgggcctaaaccatcctagtttgggcctcccggctcccggcccggccaaacccgatccatcggaagcacgcgaggcgaagtgattcgtgcagcgggttccaccaaccgcgcggcggatcggacggtggtgcgcgcctctcagccgccgagtccacggcgaccaccgcctcaccaacccacgcaaccaatgccatgtgaataacagaataagtgcgagtaagtgagccctgcggcgccgactcctttttttacgctcctctgccatttccaccctcttggagttggaggggagcacgcgccgaagcgacagcgcgaggtcgagcaggtgaagcgagtggggagggagggagatggcggggggcgggggcgcggggagtaaggtgtcggtcgccgccgtgcagttcgcctgcaccgacgtcgagtccgagaacgtcgacaccgcggagaggtatgttgtccggtatccctaaccccgtccccgtccccccgcccccccccccccccccccccccaaattgtaggggtagattgccccgaaggaaggaaccgagcgcggcggccgcttaattgtttggtctgatcgccgatgttctcgctctgctatgcttagtgattctgactattagaattgatgaatgctctggtattttgttcctgaaatcctgaatgctatgaaggttccggtgattatgtactactgaattttgagcggttctcgttaactgagtcacaagtgacctatattaattcccgcaaaaagaaagtaacctacgcaattgagttcattttcgccatgagatggctacactgtcaacaaatttatagcccgagcatactagaagataaaaaaaaagaaggaaaaagatagctagagcagtacctcaatcccttcctggattgcacaaactgttaagattgaatctgaagctatctttctcttctacttggtcgcaaagctgtgacccttatgccagttagtgtttctgattttgcagaagccgttgccgttcttttcacattctactttattcttttctcatggagatatctgagactgttccctttgttcattcaattattgaggcaccttccttcacattgtgattgtgttgtgtaccttttggttctgtgacgctgataagaataatgcctcttttttttttttaactttgtcacatctattgctatcattaaaccaaatagaatggcaataagttatacctctctagttaatagcttatactaaccacaaatctgagttataaacttttagttacatcattattgtagttgtaactctgacttctgactacaccgtgaaaactgaagcatgtttttcgacataactttcaataaattaactatatcaatgtacaccgagtcaactttccttttcatagcaacagagaagttcaatgccatttggaatttattttgtggcactcttgtggttaaaggctttatatttcaatattgaccaacttgataggctgcgatgtcttattttcttgatgataaatgtgaagaaaagaaacccaaaattgtttggcctgatcatcttactctctctctctcgcccccctacgtttctttcttataccttgagttagtaaataccaaacaaaccagagattttgctgaggagatctactgaaagtaaactcattcagggctttattattcatattgcaggttgataagagaagctcataagaaaggagcaaacattgtccttgttcaggtatatttatatgatacatatatgtgtgttcagtgatgttgacaagctgcaacttgcaatgcttgttttgaaaattgaaccagaaagagcaaatgggtttggatgaatattcttatttgcaatttcgtttaaattgttatgttttgtttgattcagttcagggcctaaaaagattaatggaatgatgattatgtgcactgaatctatatgtcaatgctttaggaactgtttgaggggcagtacttctgtcaagctcaaaggttggacttctttcaacgtgctaagccttataaagggaacccaactataatcaggtaggcttgcctcattacttgattcttgtcaggagtccacaagcaatgtatatgttctatttctgtagttatccctatgcttcattctttcttgttcgataggtttcaaaaacttgcaaaggagctggaagttgtaatacctgtcagcttttttgaggaggcgaacaatgcacattacaattcagtagccattattgatgctgatggcactgatcttggcctgtaccgcaaatcacatattccagatggaccaggtattgcccatgtatagtttatgacagattcactatagactagtcatggactatctgatttaaacaagttagctatttcctttttggctaggttatcaagagaaattttatttcaatcctggtgacaccggcttcaaggtaaacatggttttatatttatatcttgataggtttgcacttgttagtagtaaaaattcactaggtgttaatgtgtaattggtactatgcaggctttcaaaacgaagtatgctacaattggtgttggtaagttatttatgttgttcagtgatattaatgtttggttctgaaagagcatgagcagggtagtaactaatgcaatatcacctgactatcttttatcgctaaaccattatcctggtaggaatttgttgggatcagtggttcccagagtgtgcaagggccatggtgcttcagggggctgaaattttgttctatccaactgcaattggttctgagccccaggataataacctagattcccgagaacactggaagcgcgtcatgcaaggacatgctggtgctaacctggtactgctatttgttttgttataccttatgttttatcagctactcagctttattgagaaatcaaatatatacctatttttatttacgatccttcggtagtttctgatcattctggatccataccaatcatgcaggttccccttgttgcttctaacaggataggaagggaaaccgttgagactgagcatggtgaaagcactataacattcttcgggaattcattcatagcaggtaatttcagcatcttgttcttttactgctggatgtgtaacaaactaaaatcattagcatatggttgtgcagggccaaccggtgaaattgtgaagcttgcaaatgacaaagatgaagacgttcttgtagcagagttcgacttggacgagatcaagtctaccaggcatggttgggggatatttagggaccggcgtcctgatctatataaagtgcttctaacattggatggcgagaaatcatgataaggtccacctttgtggagtcatctatccttgaaaaggtacatgagctccacaacattgggaggacatacacagggtccataaatgctgccactacaatcatggtagatcacccctcttcccttctcaggaatctctgttgtacacggcttctctgtgtttgctgcttagtgatttttcaccaatttccgattccacaataaaatgctcgtggtgtgtcgttctggcagacaattgagaatataacatattaaaacctctatgttatgcaccacaatgtttcttttttttttgaggggtacaccacaatgtttctcgaatcattttgtttttgaaactgggtttcttgaaacatttcgatctgaaacggagtttctgataacattattgtgctgctgctaaatattttaattattggattcaagaaatggatcataactagaagaataaatcaggatcttttgtttcagaatagcatccgtgatggctttagagaaccatcagttagctttcacgtgctatctgctccttttccatcaactaaacccaaggttcttgtgaaccctggcacgtgaatcctggaaaggtcgtctctaatgtgattttcagctgtgcttagttgcatgcctgcttggacatcgttgccagtgcttggtcactttattttgttttttttattcctgtagcaattaaatcatcaaagtgcacaacagaattctgcgcaaaaagaagcaaaataagtggcattgtattgcatttgacgggcgatgcaacagtaaacaaaaaatttcgccatatttacatctctctctggtagggaaaactagcatgccactgtcgaacttgttgacaggaactaaacaaaaccccattgccaagaacatgagcctgctttgatttgctctattcgttcttctctgctggatcttggtcatctgctagtagcagtagctgttgttgctgtagctgttcgtccgggtgggcgaagtggagcttgaagcggccgtcctcgcggcgcccatggagcagctcccgcgacggtatcctgacctcccggagcaccagccggccgtccccgcggtgcgcccggaggtacagccacggcttcccgccggcgccgatcaccgatatcggcggcgggaacgccgccctcgtccacgccgggagcggcggcgccagcgctgctggcacgaccgtcttctcctcctcctcctcctcgtcgtcgatgggacggtgctgccgcttgcacggcagcgcgcggccgacgccgtcgttgccggtgtcgtcgccgccgccggtgccaagatcgacgtcgcctccggagctctccgagctctcggacccgagcccctcggtgcagaggccgaggtagcgccgccgctggtcctgtccggcttgcccgaaaagcggcggcggcgggcgcggcatgacggcggcgtggtggcctcctcggcacgtcgtggtaacggccatgcacgcgagcgcgcgcgcgcgtttagtaataacaaccttaaaagttaaaactagctaagccaagtcgtgtagtagtagtagacgactagtcgttgtgccctctcgtgatggcgctggggcggcacagggagttgggaggagctgagctgagcggctggctctctctcgctgcagggtcccgtgaattatagagggggggggggggggggggggggggcgggttggggacgaggagatatgggaggaggggactcgtggcctcctggtgttgcgtctcgcgcgcggagggcggtgggcgacggaccggcgttgggttgcgagatactgtttgctgctgctgccgccgcctgccggtggtggctgcgtgcggacgtgcagtgggattggctactgctggcttggacgagacgagatcggtgaggttttagcgttatactccactatatagcttctctcgatcgttctcaaaagcgtatattcttgctggattcaggggtcgcggaaccgtgttgtattagacggcacgccgatccgtcgtttcaggctaaacaagttgatattggagctatggttctaaatatggctttgaccgccctgcgtaacgtgcactgcgaagccgatgggcggtatttgctttgcgcatgtcgaatcaataatttcattaaccagtaaccaccggtaatgattgttctctcgatcaagctaagctagattctgaagtgcacgcattattagcatttagcaacgcggactattgagaattaaaattgatctactgtctgatgtgctaggatagaagaataaacgggttagaatatattctacgatggcaactgacaagagggggattagttattggtttcctagctagtgagtcagagggcgaaggagattggtgtgcggtcacgtagaagcagaactgatgactcgaggtcacgctggaagcctggaggaatatatcccacattccttcactgcatctacaatcaagggttttatttttgtatatatagcaagatagggaactgatcaggggaagagattgactcgttgaattctgatcaagcgggtgcttgtagtaatggatggaccactgacgcggtgcaatgcggcaaaaacaatgactcagtgacttttagagaaatctaactatgttaaagttttgctatgaaaacattaatttcattccctaaagtagtactccctccgtttttttacatgtgacgccgttgattttttagataaatttaaccattcgtcttattttaaaaaaatatgtaattattatttatttattatgacgatttattatcaaatgttttttaagcatgttttaaatatttttatatttgcataaacattttgaattagacaaatggttaaatattgctaaaaaaatcaataacgtcgtatacatgctcgcaaataagctcgggtaccggccagggttgcaatgcaaagaatctgcccttggacaaaagctcctgaaaacagcagtgtcgggctggtccgcgggaaaggaggcccaatgtgcaatgaaagaaaataaactatagtccaaagagaaaatacagtgtacaccattattcaaagtgaaactttactttagtaataattgctcgcgcaatttgaaattttctttttatttaaaaaaatgaatatccaaaaagaaaatgccaaagaggagaaactcgaaaaatagttttacgaatttcttgtgaggattttcaaaggaatataatcattgcaaatttgaagtaaacaacgcaaattcaaattaaagaagtacccaaatttttagattaacaatcacaagagcatcattgtcaaagaaaggattttgccgttgaatttacatctttgagcatgtaggctcggcccagttctttttctcaacttcaaacttgaactttcttgttttccattagcacgttttttaaatggtatgttttggtaaaaagttttgatgtagaagttgtttaaaaaagatcaaataaatctatttttcaattttataatagttaatacttaattaatcatgttctaatgagttttcttgttttccgtgcactgaaaatatccctccaacagtacagaacaaacggggccttgggacaaactggtaggtacaagtgtgtgatttgtgtgtaaatgtcttccatgtaattggaaaaaaaatgtcaataattctggaagcagtggtggtagcagattgttaacatggacaaaacatcgctaagagcccctttgaatcacgaaataataaaaatagaggaatataaaaaaatcaggattctgatagaaatgcaaatggaaaacaggaaaaccacatgagtcggatgagagagatagagtcagcaaaatttccaagaggtttttcgtaaaaaaaaaatcaaaaggttaaagctcttgctaagtttcctctaaaatctctacagaattatccattccataggattttcaatggagatgatatgattcaatcctttgaacaaagacctttatataaattttcttataggattgaaatattataaaatccctatgtttttctacaaattaaaggggttctaaacattgcctgctggcccaagcacctatttaattctacaaagaagaaaaaagcttcactctagatcccttaactaagttttatttacattcctcaactataaatcgtgtatctcaatcatcgaactatctacaacttaagttcctttgtggtttggatgatgatttcattctatgtgccatccatgtgacacattgacctagtcttcgtctgatgtgtgcttacatgtaaaaaagagttcattttcccctttgttctcctcacatcctccaatgtccatgctctgcctgcatgtgtcgatggtggcttcgagtgttgcagtgtgcgactcagcgaggattttggcaatacaggaggaggagggaggcgagcgcgcctaggaggcctcgtcgacaaggacctagcggcgccatatccgcaatgcccgcactatgggaatgggaggacattggcatgaccccgtcatgcatgcctttagtccatgagcgtctctgatgacccgagccacgatatcgttgctgatttcttgctgtacttcgtcgaagacgtcgatgtttggctttccggcatcgacgtggttctggtcatcagagatattcatgggcttgaaggaacgcacgggtgtcatagagtgtggccggaaccgtcgaggtcgccgagccacaacctcatgcacctctagaatccttaccaagttgtacactacaaccaatcaaagttgttgtcgatacacacatacacacatgcagagagcttaatagagattgctggaggggaggagaagctagagaaagggaaaagtgaactattttttacacgtaaggaccacacaacagacgaagattaagctaacgtgccatgtgaataccacgcagggtagggtgggtcaaccggcccagctacgacctgcatcgtcctacctcccagaaccccctatccatcagcccatcgagaaaacaatctaacagactcagcccatcaaggaaataagccagccagcccatcatcctgcatcaaagttcacaagttggacactcacgccgcatcgtcttccaatcggtgatgctgctaattcgaattcgacacacgtctcgctaacgccaatgtgacggccgacgccgatctgcacgcgcgcggtgcctgcgccgacggccgatgccgccacgcgcccatgtccacgccggtcactgcccatctcacgctgcttccgccggctagcggctttggctaagccatagcgggctagcggccatccgccagcgcttgaggcctatcccctgtcccccctggagtcctgctagctacaacaacataggtaggccgtgtaggtggcactagactgtggtagccggcgcccggccggcagaacctgtaaggtcccaagcgcatgaagctttgttatcacttgtctgtttacagagttccttcattccttgcatggtctctccatctctaaagaggaacaaagctgtaacaaagctagcgaaacttttggttcaagctataaggatggagggacactctgatcgccgccagctcggcactggtcgagggtgaggaacgcctttgagtctgaatgccctgcctgatgtgaaaagtatgatcggtagtaagtttaaaaatcaaggtatggtagacttgtagtggaactttaaaaatattgatggatgagcaacaagtgacatgtttatttctttagaattttgattttgtaggttttggcaagaagtatcgtagactatttatggagctaagattgttgttttatttaaaaataaaaggtaccatcctggatgttcttgttatttttaatgcgattgtaatataaatgaaatgtaccattcttttgtttgcattatattatttggtctacataccggagctgataatatttgagattatgcatgaaagatccattttcgattatactatgtttttaatgcgattgtattataaatacggcatgtgttgggttccgttgtccttatcgagcaagcatctccaccttatcactttttttaaagctgtgtctgctactacacgcaggatgaaatccgctatcaaaccgccaagaaactcaatttgagttttagtggttaggagactatatccagttttgcgattgagggacacatgaaactgacccatagtagtgagattaaaagtggactcttagaaagcactaaacatggccggctgggccaggcaatttcccgacatcagttctacgaaggaataagttcactggagattcctcaacttaggtctttgattagttccaaactttttcttcaaacttcaaacttttccatcacatcaaaattttcctacacacgtaaacttctaacttttccatcacatcgtttcaatttcaaccaaacttccaattttgatgtgaactaaacacacccttaacagcgagtttttttaggtcccttaaccacaaactaggaatctccacccctaaactatacaaaaccattcactcaaggtccctaggtagtatatatgggtggtttcgctaacgtggcatcctagtcagcgaaaaaaaaagcacgtggggcccacatgttagctgcatatcttattttcttctcttttcttctcctttctctcttctctcttctcttctccctgctgctgctgctcccgtccctgccccagccgcggtacacgagatccgccgcctccggagtcctcgtcgtcgctgccggctggagagcatgctgttgggggaggtcgcgccgggctcctcgtcctcctcgctgcagctccccccctcgccgtcgtcgtctccaccgctggcgccagccggttcacatcgatcgcccgcaggaacaacatctcgacgtcatggcacgccatcatcaccgtcctccctcgaccttcataagatccacgcacgaaaatgagacgccaagattgcagcatgcatgcacgcacgacgtcgacatagtccatccatctatactcaccggaggaggaagaggaggagaagaggccggcgtcgccgttctagccgcacagctgctgcggctgcggggcggcaccacggcatggcggcggctcgtcggctgcacccaaaggaaggctcgggcgaacccgagtccgggaagcgcacgcgggtgaggtcccacgccaggtcgacgtggcggtcgccggcggcgcagaaccgcctcctcccgcgctgccgccagaggagtcaggtacggacgcggaaggctagtgtctccttgtcggtgtcctcgtcgaagtatatccccaccccgtcgctaaggaggatgccagggtggccagggacgagagacggagcacggcgcggagtgagaggccgagggaggtgcgcgtccatgacagcgcggcaaagtcgaggtgggtctcatagacggaggtcaccaggctaggccccacggggccggacggccccgtgccgcggacgacgcgcagcggaagcacgccgccatcgccactccacccaccgccggcttcctcactgaagaagagaagagggaagagagaaaagagaagagaagaagaaagaaaaaaaaaacgtgcagctgacatgtgggtcccacatactttttaaaatctttttgctgactaggatgccacgttagcgaaaccacccatatatactgcctagagaccttgagtgcctagagaccttgagtgaacggttttgtatagtttaggggtggagatttctggttttgtggttaagggaaaaaaaaatctcgctgttaagttgtgggatctctgatgaacttattccttctacaaaagaagaaacaacaattcgatgggccaagtaaaaaaaaatagcccatcaatatcaaagtggaagcacccggggggtgttggcctttcaaggatgagcgccgttgctacgaacttattttcaaccagatgcaattaatgattttccttaaaaaaacatatgcacaatgatcaatgtcgcataatgacagtgtgattttgtttttttaaaagaaatcaattatggctcgtgctacataaaaagtttcactagatttatcattttcaattttcggaaaatggcatgatgtttcaaacttgttggaacaacacgtagattttcagacgtgaaaaattaactcaacactgcagatgattcactttgcgtaaaactctttagagtgccaaggggtagtacttcaacggtcaaccttgtgtaaaatcttgtgtactaattcacagtgtggaaattccaattaatttcatggaagtatcgcaattcgcaaccgaaagaaatcaaattaagaatacaaaaatccaggacgaatctggagagagtcctgcgagtgtaagcagcgcgatcagattggatcgggagatcaggacgatcgatccgcagtagtagtaatcagactgtgtttgtaattaagcattgacgaaacaggtagcaatctctctctattgaaacaaaagatggcactgtagttatcgtcttcgtcaggggacaccgcatgcttcccgtgtccgatttgacgtctctttcagcagcacgagagacaggttctcgacgaccggcatggggcaatacattaacaccgtattactgaatcgctaaatatcgtgtgaatacttattttttcttcaaatgaagacagaaatggtaatgctgctgttgcttctatgtcaggagggaatagtcggcaagatcatgccctgtttggactttggatctgtaccactcctacccttatcaaatctttatcagatgacaagatttggcaatcaccagaaatttcggcaatcttgttgtttggattgtttgttaaaatattggcaatataccaaataatttgatactgccaatttttctttaagtaaaacaaatggatgacattttttttttggcgttgccaattattcagtatggttgaagctcaaagcacaagctcttgccgacggcggttgtcttattgtcagaaatagagtaagaacatatatctcatctatacttggtgagttgagtggttagaagagagggcgagtagacaatttccaaaggaaaccgtaaggctaggatggccttaaggttggagctgctcataggaccagccttaaaaaaaggagatcctcacctttgtagaaaaaaacagcaaattgtattttgggacatcttttattattaaaaaaacagcaattatattttttccttttttttcttttagaccatccaaacatacactcttcgcgagcacatcaatagcccccaacatattggcatcccatatcaacaatcttttctatttacgtgcaactcacatcttttatcagaggagagattagacgtaactaaataaaagcattagagtggtccaaagtacaacaagggaaaaaaaaacctatttagctgtaaaaaaatgggttcacaatgaaactttagcaataaaagtggcccaaaatataatccactctaaaaagtgccaaattttatcttcccccctcgatcccctccaatttgctatcctactcttcctctctctcgtgaaacatcctctttgccacctccataatgcctgaatctccactgctgcccctgtcccctaagcccccatactactcgggtgtctgtgaagcctcatatacggtggcctctacactgtcaaatctagcaaggccgggactcctattagctccacatggcaaatttggcaaggccctagcttgagattgacttgaaacttcccttatgaagtcgatcttaaggccttaaggtctcctcttattttcactttggagatgtcgagagccatgaatatgcaatggatgatgggcacatcagtacatgagagaagatggcaattggtgatgcaaacaagaagtcggtgcttgtatagtgcgggaggagaggggtggcagctggttagcctagcataatgtaagtggaaggatccccgaaaaaaaatgtaagtggaaggaacaatggactataccggcggtttaactcttttgatttatgatgaaaatgcatgtcaacaattttagcctatcatggattcgcacgagttgaatggaataaaacatttctttcagcaacggggaaaaattatgcacacatcgtctagccggccgttatcctgacattacaatttttatcaaccttcttttgaatggagaagtttcatatgttttgtagaaaatcttataaagttcctacagggcgaatactcttgatgcttttgctctgcatttccccgcaactactatgtgcttacacaattgaccacatcgagatcttgtgacgagactacgtaattcaggattagaatacgacaagctggtcatataaataaattgtagttacttcattgctaatccatatgtatgcgcgcaagttaatactacgcggaactgcaagactggtgctgaatactatatagttggtccctttatttatcttctcaaaaatcggatagtgaacttaccaaggggacagggctgtgttgactataacaaattaactgcagtttttggacggttctagaagaaaattccgttttaaatatggctcgaactaagattagtttcggtgataaacttaatcaaggacgcgtacaatattcaatttaatctttggtttttcataactacccactaattaaattaaatgaaacggttctaaaaaatgggatagtcaacttacctaggggacggacacaggtcgtctgcagtactgcatagtactgcaggggatctcaattgctaggggacgggattgtgctcactataacaaactgcagtttttgagtgacactagcggttctagaagaaaattccgtcttcaaatccggtcaaatggaatcataggggacggaatatcgtccctaggggtggaaacgagccagcttggcttggcccggctcgtgaaagcttggcaaagaacatgcttggattggctcggcttgattaactaaacgaactaaaacagcagcttggctcggcttatttcaaagctcgagctagctcgagccggcttgtgatgctagcagtaagtaaacactacaacaacaaagcaatcaattttcaacaagtaaacgtcaagtatgcatcaggatcaaactcctacaggtcatgtaggcctcaaataatgcaaattgcaatgcagtagcaagaacaactaaaaaaaagtgaagtatagcactaacagtaacacagagtcatagatacatcatacatacactactggtacgacaattttgatttatttgccttaatctttctgtcatcaattcatcacgcacataccacacgtactattgctccacaatcacaagaccaatagaccacaagtgcacagaccacaacatgctattgctacatgcataagaaaaataagaaaacacatcccaaaacctcttcatcctgggctcgtcgcagcgaaaactgccgtcggtgggttggtgtctcggtgaggtgatgaacaacatcgagtcagggaaggtcggcgcagggagcgtcgagcagtgctggggaggaaagcacaggggaggaaggtggcgcagggagcctcgcgcggtcgcgccctaggcctcgagcagtgtcgcctgtcgcgcacgcgcgttgaaaggcggtggactcggtgtgatgggctggcggcgtgagaaggggtctagggaaggaaatgacaagggagtgggagaggaacggtgaggttagggtttttcatgggccaaatcagctgttaatgggccaggccatttttttgcacaagctcgacaagcttcacgagcggcttgcgagcagcttgggctcggctcgatttagaagcgagccatggaggcagctcgagctcggctcgtttagttttcaagccgagccaagctttacgagctcaagccaagccagagccaagctcacgagcccgagctttttatccacccctaaccgtccctcaacggaatgctcctcctccacaatgcgattctcacccatgcgacgcggctgaagccctcaatgcacaccaggcctgctcacgcaccgccacgccggtcccccgccaccatcctcgtctacaggggacggctgcagggggccggctacacgcgtcgggatgctcctccctccaacgggatgcccaattatatctagtaggaatcacctgatatctggtaggtatcatccgatacctcgcaagtatcatgcgatacatggtagaaatcatctaatacctagcaagcatcatatgatacctcgcgagtatcacgcgatacgtggtagaaatcgtctgataactgacaggtatcacatgatacctcgcgagtatcacggtaatctcgttatatagcagcgccctttaaatctagctcgaagtaatattagtttcgatgccacaatcatggacgcgcacaatattcaatttaatctttcgtttctcataactacgacccactcaatgaacgcacgctcgtgcctcgttgtcgaggggtacgtcgcctaccactgaaaacacaaagccgttaaatcctgaaaaattcgctctcatgggagtcgaacctaggaccttggtgctaccgagactcttgtaatcactaggttgcatcccctttcgccgcatatcctctctttaatgcaacaacattctaagcttaggtgaaaatcaaacttccgtgaaaacttgtgtaaactatacggtaaaattcatcattatctcatgatctcatctaatgatttcgaatttgcataagaccttttataattttgcccaccattatctcatctacttatgagatctttttatatgattttagacaactttattttattatggtttatacgagttttcgtttagttatggttagtaccatatatttaattttatctgttcatgaagctgttgctgagttggatttcttagattaattgtattttttttatgaatcagacccgcttgataaattttataactgtttgcttagtgtagttcttatactagctcccattttaagtgcagttgtagatttctatgtccaacgtttgaccgtccattttatttgaaaaatttataaaaaaatgaaaaaataagtcacatataaaatattattcatgttttatcatctaataacaataaaaataataataaaaaaatcaaataagacgataaaatgttggacactacaacccacaactgcaattaaaatgagaatgatggaaatagatcgtacctactcctaaagtgatctaaccataatattattattcctttataatatacactaactagtccctgtttctcgtttataaaacaaactctaatccgatcctaccttgctgaagttgagcagagtatcaagtaggggcggaaaggagctaatgctgctctatgaatttgacctaatagattctcacgttttttgttttacccgagacaaacaaagactcagttcttctttaaacacagatcacgctttccctttcaatggagcacgaaatacgtaatatcttataaaaaaaaccaagacccaacgactcgtcgaatccatttcttttcagtgtgttcatcgactttattctattaggaagatcatagatctatgtagcatcgctctgtttcaaagtaatgatatgctatttctatctttttacttaacctttagaataatgaccttttatacacgcattactgaacaacatctaattaaaaagggtttttgattaatcagaaaaatcacgtttcaactttcaatgtattgattttaagtacataaaaaaacaccagcccagaaaaaaaataaaacactaaatcattagccccccctcctcctcccttctatcaaaaaggattcgagataacaaataaatactacatccgtcccaaaatatagcaacttttggctattaatctggaaatagctaaaaatgcttatattttgggatggagggagtagttagattttttttattatgaatatcacaaatgcacaacccaattttcatgaatttgacaacaaaacgttaagcgattactttttgggttggcacatggactaacgatagaagggagagggaaccatttgcatcttcatgtgttgcacatgcttttaggatccatttatatttatataataaaggtagtagatggtatgcatcatttctcctaatgaaaagaaaaggaaacatgcttgaaattctcaaatagaaaatgaaaacaatggatatctctagtaatagtggtttaagagtttcaataatttccaaaacaacttgggaagatgtccgaattaagtgtacattgttgagccctaattttagaagatggcctacatatgttgtttggctttagaaatagggatgggtaaccattggcctactcttagttcaagtaaatcaacagaagcggccaaaaaaaagtaaaaaaaagtaaatcaacagaattttcaccttttttttaatacatattgtgttttaatctatttagcaaaactggattgggtaaactgataccaaggagtgatgtgcattcatcccttagaattttattttgtaagatcacatgttgaactatgttccattgaatcaaagagattaagatcgagtatgcattggtactataggaggacgataatagaataaactagctgacaccctgcatgttgttgcgagaatttatctgaaacaaaacaaacaatttgggcaaataacagtaggcaagaatgaacaggaaccatacaaatgaaatatattggttcagcttcgtgatgacgtagcctcatgcatgtactccctgcattaatttgaactcgaaaggtcgcaatattttaagatagagggagtacttcttttagtaattgcagttaccgtgctaaatagaaatagagaacgtgatgatgagtccaaatcaaccaaaattgataaattttaaatcaaatgaatatgattaaaatagcaattgaataactcaaacaactcatattaaaacaattaagaagattaattccacttctttttatttttggaaatgtcatatatatagtggtatagtttaccacacatgttagattttggttaagaatttataaaatttgcaccatacagtaaaagttgatttaatttggataaacatgcatgttacaaagcttttcttaaagaaaaaaaatacaaacacataagcttaaaacacgctaatacttatttctataaacaattttcttccgttcgatatatgggtacggaaagaaaggttaagcttcggttggactttggaaaagaggaaagggaacagtcctaattaagaaattaaattttgttatggtattaattactaacatcgactataatcttgatacttgaagagcaggtaaaatagcagagactataagtcagctataaacacacgtcaaaaagataaaagataaaagataaaagagaaaagtgaaaagcatatgagtacaaatttgtagccggctactctaaaatataatatgcgtatgatataggatcatatattaatagtgtaatattatatgtttatagataactatgtcataaattagttatcaaattgactaaaaataatttagaattaataattggctatgctattaaatgtgctcgaatgatgcgtagtgaagtcattgccctctctcttaccagtcggtcagcgtttagaatgggaagtctcgtcttgggcacatgcagtttgcggacaaattagcatcgatccacgcactacaaaaatggatttgttgttatcaatgtagggtgagcatgttacacagcaggcagtttttcgtactaccaaggtataaattgatctcgctatgtgggccttgtgttcttttgcttgtttgtttccatacgatcatcaaaatttgtttctctctccatgtgacagtttttttaaacaacgtgtaattcttaaaagctacgactcttttcatttttaaatgcatgacacggttgacatctttagatatgatatattgaaccatttatcttatttaaaatttatgataaatatgaaattcgtaagtcatattaaaagtacctttaattataactaaagtaaatgatacttatatagttttgtaataagataaatggtctcataagtttaaaaatgaaaatagtataatacaagttaaggctgtaggatcgtcttgacgttatcctctctcaagttgactctcgattcattaccggcaacactctcctgaggcatcaaaactcacctacacatcatcaactaagaaaccatattgacatgacgatatggtgtacaaaccaatcaagatctttcttaagtttgtatctcaagaaaacacaagtgaaaatataacatgcagtgttaacaacttcagcctaaaagtttttaggactgtgatactcatctaacattgtcctagccatcttaaccaaagaacaatttttctttcaacaacgcggtctgaccggtggcggtggcaggcggcatcgacgcattgagcggtcagaccggagtgactacattgatcagaacggaggtcatcgagcggtcatactggcacatctatcagactgatcgcattgaattcgagtgtaacttttaattccgctaaaagttttgatttttgggtacttcaaccattcacctcctctagttggcttagttcttgcacgcaaaaataagcctcttaaggggccgcacgtgaaaatatatttttacagacatgtctcttaaggatccgcctaaaatctaagttacctactcattttccactcaacacttcaaaacttttcatccttatccactcatctctcttacctcctctcctcattattttctctccactctttcacctcctctcctctatcactttcctctctctcacctcactggttatgacgagcggcgggcagcgcggccggtggtgggtggcacgagtgcagcaggcagagggcacggctagtggcaggcggaggactcagtcggtggcagcggaaaaagagcaatttttgcaaacccttccgggtagacgggctggagttccgcatgcaaaagccacttttgacccgtctggaaaaaaatgtttttattagaaaaaataatcaaatatatgattataaaaaaaatcaaatatatgtataaagataaagagtgtatcaataatggtgcttagcgataatggatgaaaatggatcggaaacggacgaaaactagctttatcatattcgttttcatattttttttcagaatcagaatcagaattgaaaacctggatacggaaatgaaatataatattattgaatacatatacggaacgaatacggcaacaaatatttgtcggtatataaaagtccccttaaattgagtttccttaatcaaggaagagatatctcttgttttcttttattaacgtctccaacatttatatcgttaattttgtaggcggtctcacaactgtatgtgaaaatcgattttcatggccattcctttaagagacccacatgtaaatatgattattcattttctaatcccaagatcttttactacatgtttagcttacttaccatatcacttatcaagatcttattgtataaattagagatgttatttattttatttcacattttcgaaatttgtagtgcttgttgtatactttaaacattttcaaatacaaatgttataaactacaaagtggtagatcccattgagctgtacaactttgatatagaacacatctccataagatgtcgtttgaattacagatttgagattttgtaaaaacagatatgttattttataataaatgtttcgacccttaaatgatctcaaataataaaatagtcaacaagaaagttgtagttctcatcgatttctgtaattttgatataaagtttgtcttcatctaacttcgtataaaaaagttatgtatatatacgtgtttttttttaaaatttgattatgtctgcggatatccggacaaaatttcggatagtttccgaccgttttccgattccgacggacagtactcttactatattcgttttcgtttccgagaaaaaaaaatccgaattcattttcgaatccaagaatttctggatagttccgaccaaacctatccgaatccgaaaaatagtccggaggaacggagactatccgtgttcaaccctataagcgatggtcgactggaaatatatatactatttccccctaaatttggcagaaaaaaaagaaaattatctggtagggattgtgcagtaggatggcatgctgccacgttggaaagatcagggagaatcggaggtgatgcagcaagtcactgcagcaagtcggtctcgagggaagtgggacatctcacctgcagcacccatgatatcacaagttcacagccacagatttcgagcgcttcatccaactattccactggcgggctggcgccaagtcaaatctttccgcgatcaaattccaatggctcgaacagtcaaattacccagctagcgattaatttccatcagatgatatattctctcacatttagctagtgtttgaatcttctgaagatacagatgaaaataaatattaagtgtttcaagtaaaacgatgtagtgataacatgtgattaattgagttttaattattacaaacttgaaaaattaattaatataatattttagaataactttcatataggaaatttttgcacgaaacgtagcgtttagcaatttgaaaagcgtgatacttttatccaaaagcttatccactttttttagtggattcgaacggtgtttacttgataatttcctcccactttactgatcccaagctagattaatctattttccctgtggaatatggaatgcgccacactgactattatacgtaatgtgagaaatacaagaggtttttgtcccgttttttcttaaaaattaggccaaatctcttctttttaatgaaaatagaaacttctctcttttgaggtctacctaaaaaactattactcctacagttatacgtactgttaattatcaagctaacaacaagcttggcagagaaatggctacatgccatcattaatagagtcactaaaaaacaaaatccacagcactaagtacgtacacaatcaagaagttaagcgaagtgtgtgtttcagtatggtcatcgcgtcgtcggtgctgaactgacatgcaaaacgtgcatgcttatcatagataggcacgagctggagaagataaagtaggccttactaggtagggcgatcttttgcttgtaagaattaccaaaatattgttatcacttatgcttccatggcttattaagtcaatattgatttttcaaaagtaaagtaatgttaatgtgacacagttttccgtttgaaaaatagaaaagccaaaggacatttgaacacttgggatttggaaggactatttcgtattcttcattattaggggttgcttagaatgaatgggaaaaagtcccactatatatggattttttctgaacacatgtgtattcttatttggacagcacactcaatgcacaagccgagtatcctggatcaacgataatatataatgctactagagacgcaattattaataatgcagattgttttttttttcacatcctttgtcaaatcgtcaatgtaaaccttaagcatgcacatttagaagaagttgaatggtactcccatcttacacaagaaattaattttgatctttcaaacctaaaacttgtataagctagggcaagcggtgaactattatatctctgtaggctagaacaaaataatatctggtaagacatgacaatccaaggcatgcaaggttgtaggaaggcccaagattgacaatggcaggaggtaatgttgttacatttgttaaaaaaatatttgtgcaagcaactgataacccgtttatacgggcgtacactagtacagatccttctatctgtgacgggctctaatatgcctagaaatagcgggccgtcacaaggaagtcatctcaatcgggccaaaaaaatgcctgattgagatatggtcgcacagacatattagatgggcttaaaacttaagcccgtcacggatgacacctatcagtgacgggccgtagtttaggcccgattgagataacattccatatctcaaacggacctaaagatgtggcccgtcacagatgaccatcaactgtgacgggcgtcaactttaggcccgattgagataacattccatatcttaaacgggtctcaagttgtggcccgtcacagatgaccatcatccgtgacgtgcactaacttgaggtccgtttgagatagcaattaggcccgtcacagatgactcattagtgacgggctatatacttaatctctatcgggcattaactaaagcccgtcaccgatgactattttttcatttttcatatgaaatgtttatatttgtaagttgaactatagcaaaataattaagtgcagtataataattcattttatgagtcaaaataattttacgggtagtaaatgatttcaaatggaaaaaatgtcaacaataaagttgtataacttatcaagatttacaacttttagtttggtcatttttctatataacattttttttgaacagtttgattttgaatttgaaaatataacaaattcaaacaatattttcaaatactaaatgatttcaattgaaaaagtcatgaacaacaaagttgaataactgaataactcatagagatctaaaacttttacttttgttatttcttcatccgacgaaacgttagtaatattattcacaaaattttacatatatgtgttatagtttataaaaccagataagagatatgtcaattttgtgaataatgttactatcactttgtcgtatgaagaaatgaccaaaataaaagttttagatcttgatgagttattcaactttgttgttgatgactttttcagttgatatcgtttagtatttgaaaatattgtttgaagttgtcatattttcaaattcaaattcaaacggttcaaaaaatgttatatagaaaaatgaccaaaataaaagttatagatcttgataagttatacaactttgttgtttatgacttttttagttgaagccgttcactgatctaaaattctatttgaacttttcaaactttgaatttcaaatttcaaattgtttaaatagagccatatggagaaatgaccaaaataaaaattttgcacctcgatgagttctacaactttggttttggtgacttttccatttgaaatcatttaataaccctaatttgacatcgtggcctaggtcttaataagattaatagaatactcataccaacaagttacaactactttttcggaagccaatctccaaagaactttgatgttaagcgtgtttggctaggagcaatttcgaatttcgggatgggtgaccgattgggaagtttgaatttcaagtgaggacaaaaaaagactggcctaggaggcctgagactagccaaaaaataaaatttagtttttttggattatactcatctgtgacgggcattaacttaggcccgattgagatgagggtcatctgtgacaggccatagttaatgcccgtcacagatgactcatctgtgacgggctatagttaatgcctgtcacagataaggtcatctgtgacgggcgctagttgtggcctgattgagataggtcatccgtgatgggctatagtttgactggtcgtctaggtcaaagctatcggtgacgggctttaattagggcccgattgagatagattcatccgtgacggccatttgcccgattgagataactcttcacatctgtgacttcttgcctgtgacggacgccgtgcccgattgagatggggtttaccatctgattgagatgatggtatcctttctagtggtatccaatatgcatgtagtgaagggcatgtgagaataaactatttacgcatgtgaaaagtcagccattcgtggaaaaagtttttcgcagtttcctaaagataaccgcacacaaaaacatgttttcacgggtgtttctcctaaaagaaattacatgcgaaacaattttcaatggcggatcattcaagtaaccacctgtgaaaaagtattttcatgagctgtttagttaagtgaatggcctaaacatgatgagtgacacatataattatctaagtacccgcttatgtttttatttgaacaaatacataaattatagatttatacacccagattttatcacaatgcagctgaatgcccgctcgttgcaatgggaataaaaattattcccatttgtaaaatctttagtccatatttaatttgtcattgttttgcatctcattttaaaataaattacccttgattgatggcttgtaaaacctcattgtttgggggacccacaagacagtggtgatgagtggtggcaaattcataattcaccaccataattagggtcttttaaagtagtatagattcatctcataaagcatatcattatccgagcacatatttctaacagaaaaggaaaaatgccattatctatttataacatatgaacatatcacaatccaatgttatgattatttacatcatgatcccataacaacattatgtttcagaatccattcacagtattattgttcacaattcacaagcattatgtttcacaaatgaataaggtcaatagtttaagtgttctacacgttagtagattgtcatacttccgaatggcagcatgattcatacgagacaatgtcggtcttgggattaaagtatgtgtccctctcattgtagatcttgtggtggacaaaccgccacatatactacatagtcgtgatgccatcattgtcaagatatatagtttgttataggaagggggctagctacacattggagacactgaggaggctatgttgtggttcatattagtaataaatgggtgacattttggtgtcgtcattgtcacgatatatagtttgctacagcatggggctagctacacattggagacacatatgaggatgtgttgtggtccatattagtaataaatgggcgacattttggtggttgagaagaagatataaacaatgacatatgggttctctactaaaacgagtacaatatattgttatcatggatgcacactgtaaataatagttgtaataatagccgtggaactaaaaagaataattgcccaaaacaactacagagcttaggcattactccaatttaccatattattaaataagggataaagaagctggccaacacatttgacatcaatgcctagaaattaccaggttagtttgagaaaataatgtaaagatccaaaccatttgaacacttgggatttggaagggctatttcattcttcattattatggttgtttagaatgaatgggagaaaattccactgtatggattattttgaatattatgtgttcttatttggacagcacactcaacacacaagttgttagtatctctaatcaacgataatatataatactactacgtcatatgattattaataatgtagatcgtattttttttcacaatatcctttgccaaatcatctatgtaaactttaagcatgtacatttagaagaagttaaatggtgcttcatctttaacaagaagtttattttgatctttcaaaacctaagagctgtacaagctagggcaagtcgtgagtactatggtatatctatgggctagctagaacaaaataatatatggtaagtgttgatgggttataccgtgatcataggatatgtacttacatgatatatttttaggtcatatggattggctcgtctgaggatgcaaacgaagttgtaaagagagtaaggaatacatggatttctatacaggttcggccccctattacggacaatagccctacacctattggccggatctgttgttgccattatatatgtatatcaatctagtatggtgataggcggctagttgttgtcaacttctttgggtgtttacatggtgagatcggaggtgtcttgtattgttttgtctctagttgaaatctctcaggcatgttcttatccctacctaaggcctgctatttatatcttcggctgctcccttgtccaagtagaactaggtaggtatgtatggatatgatccgagtggtattaattggacccaaataggactctgaatttttgcccttaactaggactcttaccttatctacttcagattttatccacatgtatgaggtttttttttccttaaataacttggtatgcggtggtccctacgaggtaactacacatacatagggtatcccatatctaggacgctgatagtaaggcattccatgttatgtgaggttataggaagcccaagactaacgatggcaaggtaatgctggtatagaaaacacttatgcaggtggctgatgacccatttatagtgttgtttttgggtcgtctacagtcaagggcctatggaaatcgactagttacacatgcaaaaagtcaactgtccatggagaaaccttttcacgggcagtttcgttaaaataacatccctcgagaacaagtttgcacgggtggctcacctaaaagaaactacatgtacaaacacttttcaactgtggatcacttaagtaaccgcatgtgaaaatgtttttggcaagttgtttagttaaatgaactacctgatcatgatgagtaccacaaacagttatctaagtacccgctatgtttatatttgaacaaatacaaaaattaaatatttctatatattagtgtctagattttatcacaaattatattgactagctgaatacccgtacattgcaataagaactaaaaataacaaattatattgacaagttgaatgcccatgcactgcaacgagaataaattaaaaaaagagaacatcccgtacaccttaaagctcaaaaattaaaataaaatattcccaattaattaaatctttagtccatatttgtcatcatttgaaaataaatttcccttgattgatggcttgggattagagaaggtacaaaatttcacctaccttattgtttgggggacgcatatgacagttgtgatggttggtggaaaatgcacaattcacctctacagttggggtcttttaaagtagtatagattcatctcataaatcatatcattatctgataacatatttctaatagaaaaaagattactctaatagacaaaaaagatgccatcatcttatttataacatatcacaatccaatgttgtgactatttacatcacaatcccataatagcattactattcaaaatgcgggtacaatagtattgctcacaatctattcacaagattatgtttcacaaaataatatcatcaatagttttaagtattctacacattggtagacttccatacctgacaaaatgattaatgtgaggcaacgccattgtaaggatcaaaacatttatctcattgcatatatctcatgtggataaaccaccacatatatactatgtagatgttgtgccatcattatcacgatatatagtttgctacatgaagggggctagctacacattggagacacggaagaggatgtgttctggttcatattagaaataaatgggtgacattgtggcgccatcattgtcacaacatatagttggctacatgaggaggctagctacacattggagacgagggcgatatgttgcggttaatattagtaatacatgagtgacattttggtggttcggaaaaatatatatgttattgtggatggcacactatgaacaatagttgtcatgaatgattgcagaaaaaccacatagctaaggtattactccagtttaccatattattaaaataggcataaagaagccaacacatttgacatcaataacaagaaattaccaggttagttggataaaataatgtaaagatcaaaaccattgatcacatgtgttagaaccaaaactagactcatgttgattaaaagtaatttttgtaggtaccagaattatatgttttaagtagggaagatttgtgtgctgaacaactttatttcaaataggaaaatacagttgcacataaattttggctagttacaaacactaccatagaacagagcataactgtggatcataatcgagatcagtgtcaatttttgactggcagttatggacatgaatagggttattacacacaccgggatctcaattaacttgtataaaaatctttgtctcttatttccttgctataacatcgtttgcgtcctcgtactagcagaaccctatatactgaaatactatagtccaagtatttattatcaatcgacatataagtgaaatacatatttagccctacaatcttgtatcacgaatagggcatacactcaatatttgatagagtctaagtggcacttggatggtagctatgggagaagatttcctatgtgccactgagatttttctcatttatgaaaattattctttattgatgatgcataaatgggattgagtataactcaaggaagtgaaagagattggatgaactcgatcaaagccacatataaattttccataggttgctagggcaccgggtctacaacggtttggatagcatgatcatattatccgaaccatagaatcactgttgggtttgagccttgaaggcttgaacccacagtgatatgacttaaacaggcttgagaactatcactaccactactacaaaagtgatttttctgtacgagactccttcattttttcaaacagactataactagtggcgtctgcaaaaatcgagcggcattttcgcaaacggctgcttaagacgcccatatggaaaaatcgattttcccatatgggtctcttaagaggtccgcatgcaaaaatgaccttatttttgcatgcgctcacttaagcacctgcatggaaaaatcaaaacgtcttaagcagccgtatgcaaaaataaatttaaaaattttgaaactagtgtatctcactcatatgaactccaaattggatgattctttttcccaaatgtttctaaaatcatgctctatcatgttattatgttcttattgctattattttggccattttttcttgtgactttgttttataattaaaaatttgaatttcaaaacttcaaacaatattttcaaatactaaatgattctgctgaaaaagtcatcaataacaaagttgtataactcatgaagatctataacttctattttggtcatttctttatccgacaaagtgatagtaacatttgttcaaaatttacatctctcttatagtttataaaattatataagagatatgtacattttgtgaacaatcttacatatcactttgtcggatgaagaaatgaccaaaataaaagttatagattttaataagttataccactttatttttgatgactttttcagttgaaatcatttagtatttgaaaatgttgtttgaagttgtcataatttgaaattaaaattcaaactgtcgaaacaaagtcatatagaaaaatgaccaaaacaaaagttgtagatcttgatgcgttttacaactttgttcttgacaattttttttatttaaaatcatttactacccgaaaaattatttgaatttcttttttaaaaaaattcaaattttatatagttcaatcaaacttggatggcgaaatgaccaaaagaaaaatagtagatctcaatgtgttctacaactttgattttgacaactttttcatacgagttgatttagtgccgtaaaaatctacccgaaatttcaaatgaaaattttccctcctcaccactttaaaaaattttcagtctctcctattctctctcccccccttgatattttctatctctcctcctattcctctctctcactcactcttttctctcagcactcactcttttctctcccctctctctcggtctcggcggcaccgtcgacgctcccctccgcgcgcggccgctcctccctggtggtggtggtggcagcggcgccgaccccgacgatgacgacgccgaccccaatgacgatgaccccaacgacgacgacgagtgggcggccacgacgacgacgatgaccctgacgacgacgacgagtgggtggcgacgcgggcggcggcaccaccggcatcccctcctcaccatcgccaacgacaaccacgaggagctgggccaaatccggcggcggcgggcctcgtccccccctcccccccggatcggtggcggcgagagcgggagcgcgggcaggcggcggcggaaccggggcggccggcgagctcgggcggcggcgctagggtttcttttttgttttttttatttttggaattttatttttattttgtgatttttctctttgcatgccgtcgtcttaagcgtccgcgtgtgaaaatcggattttcgcatacggttgaaccggtcgcatgcaaagatcgcgatcttcgcagacgatttggcacatgcggttgcaccaaccgtatgcgaaaacccttctcgcccgtatgcaaaaaccatctttgttgtagtgtacggttcacaatggtttggatgggaaatcattgtgaaccaaaagtgatagactgatttcgacgagtgtttttttttaagtagtgccacaattttggtcatcatacgtcgtgtctaaaattgtaacttttgaaaaccaatttacattaaattaaatttataagactaaataaagacgatggtcattgaacaattgttgagaaaaatctacacacatgtgtgtccaacacaaatgtttacacatatactactatgttcatagtcgaagttagattttttttttccttaaagggaaagtctgttttcaaattttagacctcactccttccgtttcaaatatatcgtgtatttttttttctagggcaagcttttgaccaatgattactctattatgacacaatgttaaagggatagattcatattcaaaattactattataattataattttgtcatataaataatattttaagcaattgttagccaaaatctcgtcctaacgaaacaaaatacgccttatttttaaaaacacggagtatatccttaaatatttctctatccaatataaaaggtcaatcttttaaaattccgatcatcaataatttctcaaataattactttgaaataaaaaaacatatgcaaatttgtgtcgtcataatatccaatgaacttattcaaatttataaacttattttaattcaaaatttgatcattaattttttttttaaaaaaaaaccaaatcttatcataaacgtcaaatatatttttgatagtgggggcgataataccataaaactaacaacagaagagacatgatactactactgtaatcctaatacgtacgtacgtatacttctacgccggatgcataacttcagccttgtgagacacaacagttgctgcctagctcgtggtcgttggttttttcgctcgagaaaccactacgcgtaaaccgtgaagtatattatatatagccaactggtcttctcgcaaatccgcacatccctttctgcccctcgtcttctccccctccctggccggcctgtctagtacaaaacaatggggactcggctcttggcgctcgcgccatggctgctgctgctcctcctgcagctcgccggcgcgtcccatgtcgtccaccggagcctcgaggccgagcaggcgccgagctcggtgccggcctccattgtcagccccctgctcaggacaggataccacttccagcccccgatgaactggatcaacggtaagcaaagattgtgctcagctagcttctctgaacttttggatgttcttcagttcctctttgtcttggtttcttcgacatcttctcttcaaagcttggtttgttttggtttcttcttatcttcagtattagctatagcttagctttattacataactagtacaagaaaatatcatgccatagacgaacaaagcaatacatggctctgaattttagctgatgtactccctccgtttcagtttataagatgttttggctttggtcaaaatctaactgcttcaaatttgatcaaatttatagaaaataataataatattttaaagccaagataaatttatttaaaaatatatttaattattaatttaataaaactaattttgtaatgtaaatattattatatttgtctataaacttagtaatctgaaacggagggagtatgcaagtagtactttgcaccttggtaaaaaattaaaacagcttctgtggttagtggtttaatctcgtgttaatctacataaccgctggtgatttctggtggacaaaaaaattacagcttgctgagttatcaactttatattggctatgttagttaggtagtcctgcagttgttttcttctccatcagaaaagtcaagctgcaggcttttaagttatcacagtatccgacaacggtgaagacttgcagttcagcaagtacccgaataataatacaccagctttgtttttgagcattaagctaataactcttgattgatacctaattgatgcttgctgcaattatactgttctaactcgatttttttatttctcttcttgtgtctggttctgatcatatcgctgcgactgcaaattaatctcatcgacgacagatccgaacggtacgaattttccggcccacttcttgcaaattatctctgtcttgttctgcctactagatctatgatgttgagagtataatgaacagcaacgcttgtgtgcatgtgttttttaaatatgggaagattaaagaccaattttttagaaggagctaagagaaaggacagtttaacattaaaatggtgcatgccggcacgcacatgctgcaaggcgaatgcgtatatacaacggcctcttgcagtaggcagaaaaatttaagctggtcaagctttcgaagtttggtcttaaaatttgacaatgggatcaatcaacggattcctttggcgtatcactgtctggaagtgaatctcaatttgattatacgaatttagacatgacaagacataatcaatttcacaataaactttaatttaaacaactcatttttgtaaaacagtaaagaaaccatataaaaagtgataagttgataagcaataagttgtacctgtacacaagaatagatctaattaacatgtgtactatgggctcccccccccaacccccacccccaccccaaaaaaaaattgggggatccgccccagttatacatgaaaaatgttttgagcttttgagttgataagttgagaacattgaacagggccactgtattacaagggatggtaccacctattctaccagtacaaccccaagggagctgtgtggggcaatatcgtgtgggctcactcggtatcacaggacctcatcaactggatagcccttgagccggcaatcaagcccgacatcccctccgaccagtacggttgttggtctggctctgccaccatccttcccgatggcacgccggcgatcctctacactgggatcgaccgccccaacatcaactaccaggtgcagaatatcgcatttcccaagaatgcgtcagacccgctccttcgtgagtgggtcaagccggcctacaacccggtggccacgccggagcctggtatgaacgcaacgcaattccgcgatccgacaacggcctggtacgccgacggtcattggcggatgctcgttggtggcctgaagggggctcgcctcggccttgcctacctctaccggagccgggacttcaagacatgggttcgggccaagcacccactccattcggcgctcactgggatgtgggagtgcccagacttctttccgttgcaagcaccaggtctccaggctggcctcgacacatctgtgccgagcagcaagtacgtgctcaagaacagcctcgatctcacccgttatgactactacacggtgggcatctacaacaaggtgacggagcggtatgtgccggacaaccctgctggcgactaccaccggctccgctatgactacggcaacttctacgcatcaaagaccttcttcgacccggtgaagcaccgccgcatcctgcttgggtgggctaacgagtccgacagcgtcacctacgacaaggcgaagggctgggccggcatccatgtaaatcatagttacaattttgcaatcctaatttcttgtactacctacctccacaaatgtttgatgttattagttatcttaatttcaagagctaaccaaacgtaaaagaaaaattggagggactagaggtttaattagaattgatttggagattgatggcttggcttgtgtcgttggcaggcgatcccaagaaaggtatggctggacccgagcgggaagcagcttctgcagtggccaatcgaggagctggagacgctgaggggcaaatcggtcagcgtctttgacaaggtggtgaagcccggggaacatttccaagtcacgggcctcggaacctaccaggttgctacactacaaaatcaaaaaccagtaacttgaaatttccatccacaagaaaatgagactagaatattggccatatatattgctgccgtcaagggccccatgtgcaggagcttcctagttatacggagtactagctaagctcgctccggtccaattccgtatgggcagcgatcatcgcgtgcccaattcctgctcgtgcacgcgaagatcgcgaagtcgccggaccggcgatttttccgctcggtcggcgtcagcttccgctcccgcccgtttcaccttcaacggcgtggacgcatccggttggccggagaggaacctgcaacgcatcgcatattcgccttctaggtgtgacgctgacgcttacaagttttgctttgatatttgtgtgtcgatcaggctgacgtggaggtgagcttggaggtgtccgggctggagaaggcggaggcgttggacccggcgttcggcgacgacgcggagaggctgtgcggcgcgaagggcgcggacgtgaggggcggcgtggtgttcgggctgtgggtgctggcctccgccggcctggaggagaaaaccgccgtcttcttccgcgtcttcaagccggccgggcacggcgccaagcccgtcgtcctcatgtgcaccgaccctaccaagtacgataccactaccagccaaatctatactactaccttgtgatgtctcggtacaatgcaagcagcacacatgcatatacccatcctgcatgcactgatcaatgtctgccacgttttcaaaaaaaaaatgagagaagaaatacatgatcttagagttggaatcacacaccctttatcacagcactatcaaatacgtctcctgtcacattttcgcaattacccaaacacagtagacaacttaaaatgctaaatccaaagctctgaagttgattaattactgtcctttttttattgagcaggtcttctcttagcccggatctctacaagccaacttttgccgggttcgtcgacaccgacatctcgtccgggaagatctccttgagaagcttggtatagtacacacatatactacgagcttaattaaccacgttttttattagtgcctctcgtatataacttaccaatgctttattgactgtgaccatgattagtcttatatatgcatcattgtttgtgacttcgtttcagattgaccgttcggtggttgagagcttcggcgccgggggcaagacctgcatcctgtcgagagtttacccgtcgatggcgataggtgacaaggcccatctttacgtcttcaacaatggggaggcggatattaagatttcacatctgaaagcgtgggaaatgaagaagccgcttatgaatggcgcctaattaatttgccgcggatatatatgatggcgactttaattaattgctattattaaatcatcactcgccatctgcgatataccggccagatcgtccctgacatcgatctcctgttcttggccgatgttgcacgctgcacgatatttgattgcttgttgctgaggatgattggagtttgtattcgtgtctccagatatcgaaagaccagggtaattttacactcttcttgtacaattaattgattgtatcacgagttgtttgtaaacaattgtttgtatcacgagttgtttgcaaacatttgtttgtaccacgatcgagttgtgtgacaaataaattaagatgctgattatttcatcatgttacagataataaagaggttttccgtgatttacttcacttgtatgcatgtgtccttgtaacgctgatgaaataagatgacctaatttgataatcctttcatttcaaaatataaatgcatatatggcccacttggcattactttttccaatatgttgcgcatttcgttcctaaattgtagaatttgctttcaaaattaattttaggatatttttcttacagtttaattacccggattaatttttatgattgctagtacgtacgattaaaaagtttacctaaattactactaaaaatcatatttcaaaagtttaaccttttatttaaaaaaattcgctgctcttacctggcaaaggggaagttcatattcctgttgcgagtcaaaggtacgagagatatcgccaccaatataagggggaaatttgacatttatttatccaaagaaaaggagtactgcctctcttttttttttcgtttttttagaactcccaagtagtggcttgaaattgctccaccgaatgcgtcagaaagttgtatgtatcatcataatcgtcagaatcttaagacagaaaataatggtaggtgcgtgcgctagctagtgtcatggttcgtacggatgatggtgccattattatatcagggaactaacagtggtgctatgctaatcttttctttaaaaaattaccagtatcatgtaactatcaccaggtggatatcctgcctatgattaacgacagaaacacgatcgaatcagggatatataatagttaatgtgagatacgccagttggccacgtcagcatttcaacaagctgcaggggaattaaaacatgaatgcctgtcttttggttagttgcaaagcaggcatgcaaattaatgtgccctagcatatatacgcacaccgctctcagtgcactggaagatgctctcggctctcctcaaggacatcataccaatgttgtgcttacactctcccaattcctaaaatcaactggtgaaacattgataggataactggttgtctggatgtgtacatgtctcagtacgtcttttaactcccaaatcccaattccttaagtgttgttggcttcaacataaaccagctaaaagtacataacctataagtgagtgtatatatatgcagggccttacctacgaattcgaggccccagtgcaaaacacaatttaacgctaatataagtaggaaagacaaaaaaaaatagcagtggagctctatctcagtcagaagaaaattttaaataattgttagaaaaatattatgttatgatgtagtaatttatttttattatatggaaaaatgtaatctttaatgcctagaacgcacgttcatatcatcgtcatgagctatagctctttgagttagccatgattgccatcgaacacttatcggaactaaaaaaacaagcctgttctagccaaatgaacaaatgagtaaaagtgaaactttataaaaatggaacaagaggtcttcaaatatattgaaacgcattggcatagattaaaatataaaaatattgcggcccctaatttttggggccctattcgatcgctcattttgcacgccctcatcgacagccttgtatatatgtgtgtcgggattgaacatatcttaaaaattttaaaccattgaatccctttgagatccatgcaccgtattattttcttcctatccctctcatcatttactgcgatgcatgcccctcaccttgcctccgcttgaaactagtgtcaatggtgttgacgaggcccactagaccttccccttcattcccggctctcttcctcctcaagcaggtcccccgtcctaccatcttctccatttccagaggctccctgctgtcggatctgccaccaccacataacctctcgctccgctttgcctccaccaccaacatcggccaattgtccactgcgaccttgcagcttccatggtgggggcgcggcctcactgcctacccattctgtcatccaccatcaggccgctacttcccatgtccatccctctaaggattgcaatctcctcgatttcccactccctcaccctaaccccaatccgaactatgtactctaacttattgggccactgtcaatcaccggagctttgctggagttggaagaggagttgggcgcataaatctttaaggaaatcaggtggcttgaaatctgtaagaaatcccctcgattttctgtcgaatgctaattagcaattcaatgtatatttgtactctctctgtagacatgccaatggtatagtaacgagtgttgactgtttacctcagctcaacagaaaagagctaagagtgtctctaagagtattaaaaaattgactcccttaaaaatttggattggtgttattaaaaaaattagactaaaaatcacctctctcctccaatagtacgctaaattttgtttagatgtgttcttcttcaattgtttatgttttctttttctttttcctaggagggagatcggtgctgctaggcagatcggtcgatatagcaactcgatgatactagggttgggagtgccgatatttgtccaagaactgaaaaatatatggtgcaaatcacataggtagtgaaaagctggaaactactgttggataaaaattgacgcctaaaatttgtccacgtaaaagttttcctcacagattcaatcatgtttttaggttatgtggataaatcttaagtgcccatttttagatctaacggtaatttttaagtttccactgtatacgtggtttccacttcatattttcccctcaagatttggatacctatcggaagtttggatacaacacaaacattaggaactaaaatatagttatataccaaaacaaaatttaaatttgcactataacgtgttgcttcaaaatttcttaatcctatatatctataaagtttatctcccactaagtatagttaatgttaattctcttttctcctacgaaaccacatcacctcatttttttttgtcctttggatgataaatcaaggacgtaaattgtctatgttcactaaaaaatgtcaccacattttcaatcatttataactttttgataattaaatcgatcaaggtacaagacatgatacataacatatttgaaagaaatcatacatataagaaagtaaattgtatacaacttatatctactattttgtcatgtagttcttccgtagtaacgcgtggggttcccatcttgtgtaattcatcatgcgcttatcacaccatctaatagtttatttaagaaaaagtcaaagtctgaagtaatttagatagaagccactactacaaaagtgatttttctgtacgaggccccatcatttttccatgcggaccataactagtggcgtttgcaaaaatcgagggtcattttcccatacggctgcttaagtggcctgtatggaaaaatcgattttcccatacgggcctattaagagggccgcatgcaaaaatgagctcatttttgcatgcggctcacttaagcgcccgcatggaaaaatcgatttttccatatgggccacttaagaagccgtatgcgaaaataaaatttgaaaattttgaaactagtatatctcactcatatgaactctaaattggatgattttttttcctaaatgtttctaaaatcatgctctataatgttattgtgttcttactggtattattttggctattttttcttgtgactttgttttatcatttaaaaatttgaatttcaaaacttcaaataatattttgaagcagtaaatgatttcaactgaaaaagtcatcaacaacaaattgtataactcatcaagatctataaattttattttaatcatttcttcatcccacaaagttatttttaagattgttcacaaaatgtacatctcttatatagttttataaaaactatataagagatgtttattttgtgaacaatcttacaaagttataaaactatataagagatgtttattttgtgaacaatcttacaaataactttgttggatgaagaaatgattataataaaatttatagatcttgatgagttatacaactttgttgttgatgactttttcagttgaaatcatttagcatttgaaaatattgtttgaaattatcatgttttgaaaatcaaattcaaactgttcaaacaaaatcatatagaacagtgaccaaaacaaaagttgtagatcttgatgagttatacaactttgttgttgatgatttttccatttgaaatcatctagtatccgaaaaattatttgaatttcttacattttaaaattcaaattttatatagatctcaatgagttctacaactttgtaatttcacacctaaccctatcttatcctctcctctcagtcttctctctcactctatctcttctctctctctctgactgagatcgagcggcgcggggcgcggcggcagtgccggccgaaagcggcgcggggcggggcgggcacggcgagcgtggcggcggcgacggccgagagcggcgcggcgcgcggtggcggcaacggtggcggcgggcgggagcggccgcgggctccggtgccaagggcggcgggggcgtcgatccggcggcggcggcgcgacctcgcgtcgatccggcgtcagcggcccgtctcagcgtggatccggcggcggcgcgatgacggcgtggatccggcggcggcggcgcgacctcggtggcccgtccccgcgcggatccgccgcctctacctccctctgtcgtcgccgtcgacttccccgcccttccccgaggcgcgacgacggcgtggatctggcggcggcgcgacctcggcgtggatccggcggcagcggcgcgacctagcatcgatccgccgtcggcggcgcgtcccggcatggatctagcggtggcgtgacctcgacgtcaatccggtggcggcggcccatccccgcgcgaatccggcgccgacgacgacggacaacggttggagtgacggattggccgacgacggcgacgaatccggcggcacggaggccggctggattgggcagcggtgggctagggtttggagcggcggattggccgacgacggcgatgaatccggcagcatggaggccggctggattgggcggcggtgggctagggtttagcttttttctttttttttatttcgctgaattcattttcacatgcggctggtataggggaccgcatgcaaaaattggatttttgcatgcggttgctctagctgtatgcaaagatgacgatctttgcagacgatttcgcgcatgcgaaaatcgttgccgtccgtcggcaaagacgtattctgtagtagtgagcagaaaaatcctgattaggtaattcttaattgaaactatcaattccagttcggtgcttaattccgatccacaaaaagacccctgacaaaatcaattaattaattaaccgagagtgacaataggagcctagccagctacctgtccaaattgtgcactgtatatgatagtatacgccattaattaattatatacatcatctgttcttttcgtatcgctatagcgctatatactactatagctagctctagaaggaagggatgggtgataataatggctgtcgctaataagacggtgaacacaatagcatcatcagcgagtagtagtacgcgtgagagaccgatcgagaaacgacgacgtgtgcttagctactccagttgctctgcccactacgctctcgttgaaaatgcgatcgatccgtcacccgatcgagcatgcaacgacttttctctctcagagacttgtagacttgtgctcattgtactacgtacactacgactcagactaccctctccgtcgtggaagcgtgcaattgggagtaagcaacaaagagagcacgcacccacggcaggcttggccgtcaaatgcactgctcccatcccgtttagggtttgtattggagagcttatagcctagcggttaataatctaggtttttattcggattctgacaactgtagttacagagttttaaaaaggaactagaaattagagatagaatttttcacttctctagattatcagaaactagctaccaattaactattttcttttaattcttaagttatttcaaacatgatgatagtagatgccaaataatgcgagtcaatttgatgcgcattactactacttaggtaactgattatatagctaggaccatacatataggaagtacacccctgattggacactacaggcatactctctccgtccaaaaaaaaactcaacctagaaaaactcaacctgagagaggatgtagattgtccaaattcgttgtcctagaggaggggtcacatcccctcctaggttgattttttttttgaatggagggagtatatacatatgtatctagcgatctactcactctgtccacacagaaagtcaaattaatattggataagatattttctagtataacgaatttggactatccagattcgtctcgtagtatgaaatatcgcctccaatgctatgttaactttttgtgggatagaggctgtgcccgggaggagaggttgggaacctttcccccggatacgaaaaagggtattcccgttagtgtgtgattaattaattattagtctaaaaaacttaaaaaaataaattaatatgatttctaaagcaacttttctatataaaattattacaaatatcgcactgtttaacagtttggcaagcgtgtgcgaggaaaacgggttgtgaagttgaggaaacaaccagcggtcaataaatatatccgtacttgccggttgcacaagtttacaaatcgcaactcgcaagtgttgaattacatgtacgattcactaaaaacttcaaactagttaagaatgacgagttaaatcatttattcttcaaaaatttccttagcctggaggtttgtttgcctgagacggtgtgacatcccgatccagggcttaatagaattaatagaatacttatatcaacaagttacaacttcttttccggaagccgatttccaaagaactccagagttaagcatgcttggtctggagcaatttgggatggaatttttctcgggtgcgcacgagtgaggacaaagtgctatgaaagctgtcagatataagcgggcgcctgagagaggcgggacgggacgttacagacgtgggacagaacatacattaaccttttttagttaattatgcaagcaaaattcaaattcaaggcagctttggcacaattaatatttgggtcgaagtgaacacaagcagtgacaaaggcgccactggccagctagcccggataaacgtccggattcacgggcaaaaactctattaaattttaatattggttaattaattgatactgaaatttctatagcaaatactagttatattgaaatttgctcggccttaaaaatctttttctccaccactaaagtttaagctagggaaagtaatttacttaattatgttcagcacctagcaaattaattatagaaactatatatacatatcattaagaagaaattttacggtctttaatgttgtatcggaagtactaatacatgatttttaccgtaattttgacaaattgaccttttgggaaaatttatttcaagaatagactataccaaaaacttatttaaaaaatagaccgtcagctcaacgccataaagattggcgctgaggtataacgctttaacgctatacatattggtgctgatatctcatccgaggtggcaaaaatttaccagattgtaggtgttgacgtttgatgtcacgattctggtatttgcatagtatggggatcgatggtactaggatatatgcgagattgtaataaaagagatggggacgaggatttttatacaggttcgggcccctgaattgtcaggtaataaccctactcctattggccgaagccggtcgttgctcttattcaccataatcacaccagtacaatatttggggtagtctatctaactgttgtcgacatagcgaactgaagtgttgactcgtagtcgacaacagggtagccttcctcctcgaatccacatccggcgagatcaaagacagcgctatgtctctcctgacagtatccgtagacactataggggactagccatgcttatctctgaagtcgatatccggcgtcttgtcttgccgcatgttggcttgtaagttaatcttgtgtcttgatctattattccgtgtcccctctcctcctaggggaccttgtatttatacccataggtgtccccttgtccaagtagaactaaggaaaccaatatggatacaatccgagtagtcctcgtcgttttcatgtaaaactctatttatccttccttatgcggaactcctcctatatccgaaggttgtttccatataagacatggtatgtggtgggtcctgccaagatttagtcaactacttattagatatatggtatctaaccctgacagtaggtggtcagcactaatgtacttgggcctgagttgttaacaaataaaagatatctacagaattctctattgcatgtatacctctgctggggtggttagatgctattgctctcattgcatagaccactgtccgagtctctagcttgcacttttttcaatgtttttttttcttttttttcctttcaccaagttctacacttttgaaactacacattttcccaagaactctttttatatattttaagtattactccctcaaacccataatataaggaattttgagtgtttgtttgcgttgtttgaccactcgtcttataaaaaatttggaattatttttttgatttattttattatccaaagtactttaagcacaactttttgctttttatatttgtataattattttaataagacgagtagtcaaacagttcaagcaaaaacttaaaatcctttatattatgaaacggagggaataaatgctatataatcgaaccgtggtccttgaggtgagagagtaggcttctagccaccacacgaagcaagcacgcatgaatgttttgatccagaaaacaattttagatggtaaaaagctccgccccaaacagcctggcgttgacccctcctgacctagcaaatttttgccacctcagataaaatatcagcgccaatatgtatggcgttaaagcgttatacctcagcgccaatatctatggtgttgagtcggcggtttattttttaataagtttttggtatggtctattctaagttttccaaattgtcaatttatcaaaattacggtggtttttaataagaaacttatgttcgaccgtagataggtggtaggtgaaggccaaaacgaggagtataatacatggtaagcccagttgtagaaggctgcagacgttgtcacagtttatttgctaaaatacattttctgaaaacactttcttgtactgtattttcaaagaacagtccaacgaacaatccatttcaaaaggggataattttttttaataattcatatcaatcctgcttctacaaggtcagaaaccggccggtagagaactttaatttacacagcattatgatagaatgtaattcatccgtaagtttaaatatcacaacaacgtgaacacatgtttaattagtcaacagcataaagtggatttgatctggagatttcttgtgtggagttacaagaaagatttgttttagtgagtcaatgactcaacgtctctctctccaagttggagcacgctaatgatgagatcagtcacaagacttccgtgatgcatatgatgtgcaaattgaacatcgatgtggtccatccattaagcaaatctagatcacactttgaccaatcttccacgtattgcgagcgtaactcaactggttagatttctcgtgatgaaaccaatccttcatcatgattcaagttttatatttgacacggatatttatatttacagctaactcaagatatgcctggcccaatttttcaactaactcaagatatgttcggcccaatatttcagttatgctcatagtggtagggtgagtgtgcacgtgttaggagagtttattgtttttaaaaaacaaaaataaagcgagtaccctcccaacaaacatgcagccatcttggaagttaggtccagacaaattagtcttctccttcgaaatattttttgcttcttcttaattactactccctccgtctcaaaaaaagacaaaacctggtttccgtgcccaacgtttgaccgtccgtcttatttgaaaaaattatgaaaaaaaataaaaagacaagtcacgcataaaatattaatcatgttttatcatctaacaacaatgaaaatacgaattataaaaaaattcatataagacggacagtcaaagttggacacggaaacccagggtttgcctttttttttgggacggagggagtagttcggtccagacaatgtaaaatatatttcactaatatatgacgctagagaatcaaatggcatgatatacaatatcatttactccctccgtcccaaaataagtgcagttttagcactgttcatgttcaacgtttgaccgttcgtcttatttgaaaaaagattatgattagtatttttattgttattaaatgataaaacatgaatagtactttatgtgtgactaatttttttaatatttttaataaatttttcaaataagacggatggtcaaagtgctaaacacggatatctatggctgcatttattttgggacggaggtagtagatatgatgatgtactatcttcacgtaaaaaatcagctccagggtgtactttagaacgggcataattgcagagtaagatacatacaagtggctgatattgggatcaggataatataaacgtgcaaataattgtcatgttgaattaatatatatcaacggcccttccaatattgttccttttttgtcataatcaaatttggacggatactgatcagaaactgcttagatataaatatcaattagttaacgtatcagtcaagcaaaactggtttatttaacgcatatgaacaggaatctctctcgaaagtcaacaaaaatgaagacgtacaacttcacagcaaaacacgtgcagtgcagtatcacttatcagctgaagaacagttaccctatcaattaagcaatcaattgaagggtgtgcattgaagatttgaagggcacaattgaagtcaggcgtggcggctgccgacttcaactgaaatttcagttagattttgctagtactactacctgtttcaaccgaagtttcagtcagattttgctaattgaataatctctgaattgaactgtaaagcgaacgaatagtcggcccaagattgacaattcagtcagagtacatttttccatggagaccacgaatagattagctggttttagatatgtttatggccaatgcttactttcgtcgattatttcggcttatacagtttcacattttgcagggtaacgtcccgatgcccatgtattacgactgaacacgagtgcaatgcaagcagagagaaattatttgccaaacttttctatcagaaataatcgagtggtgactctagtgcttaaaaaaaacacgatcgtacagactagtacttgtttcttgtcagtatagattgaattaataaacttttttttgagacaaacaaacccaatattgcttacgcatctcaatcccctgcaattggtcatcttagtcattagtccttaaagagatcctcacacatttgccttgatcttgtccttagtccttacccacaaatcctgaagtcgttgagttaacccaaatattacgatacgtctccgtgaaacgtgtcacacgccatagaaatcacttataacccctcggtgaaaacgatatttgagctgccctctaatttccctgtcattttaatttgccttgtcaattgtcataccagcgttggaagcgcacgcttgcttgcggcgtcgcgcataagcagcaatccaatccacataaaaaaatcattgaaaatactccctcgttctccttccctaatatttgacgtcgttgactttttaaatatgtttgaccattcgtcttattaaaatcttttgtaaaatatgtaaaattatttatatatatataagtatatttaacaatgaatcaaatgataagaaaagaattaataattacttaaatttttgaataagacgaacggtcaaatatatttaaaaaaagtcaacggcgtggaatatttacgaagagagagagtatatgcacttctgaaaaagtaacgtttcatctcatcacagccaaagactttttgtcatggcgccaaactgcctggcagtgtcattcccacagtgacagacagatcacgccacccacaaaaacgaattaatggagtcagaaccgctcgaattaattgaagctgcaggtaacggacacgcgcgtgacatctatacatgaataatcgagaaagagagaatcgcaccaacgaaaattgctcattttcgtggactgaaaatggactgccactatgagagctttgtacgtacgtagtagctggagacgctctgatcgatctctctcgaccgatctctccattagtttttggtacatacgttttctctctgcaggtggtgtacataggaagggaaaagattcttccatggagatcagtcagccactcacacagagatagaggacactaggacagtgtcacagtggtggctgtggctggtccatttgagtggagggtgatcgatcgatcgagctcgcgaagactgaggagaacagcgtgtgcaggtcggtcgggattgtgctgtggcatggatatgcatttttcatgcactatatattgcacttggtgatgatacgatcgaagtggacggatcaaaggacagctcgatcgggatttgtgttgtggcaagcagtggcaatggatgcatatttttttcatgcgcttggtgatgatacgatatgaattaagtggagcaaataatggatatggacttgtgcaagtctgaggctctgatgacggtctgaactatcaattcagtgcagaggtgcaggtgtgatgtgaggcttttctgaaggttttgccttcttctagcacgttttgtcttgttgttgtattgattttttggtgatttggatttttgatacgatttgggagcaattggaccggcatgcacttccgttatagtggttgtagtttggtgattgatctggattcttcttttgcagtgaaaaccccaacagaattgtgcatctatgtttgcgttttggagttgagtataagtaaaaatttcctccatccctaaatataagggattttggttggatgtacatcctaatacaacgaatacttcctagcaaatacttcctccatctctaaatgtttcatgtccaaatttattgtattagaatatgtcatattcaactaaaaatctttatatttagggacgaagggagtacgaagtaaactattggtttacttactgacttactgatagtgttgcaaaattgacagtggtaagtgtacgtgaatgcacgtgtttgtactatatttaaaaaaaagaatttgaaattagtaattacgactatatttgtccatatataaatagcttctaaattgcatatgatccatgaaaatatttttgttattttttattattatcattttaatgtttttaaattcagaattaatataataaatttgcaattgtcatggaatcttaatttatttttcttcattaaatagttccaaaactataacatgataaataggaagtaatcgtaggctcggaattagataatttattaatcctaaattcatatataataaacaccttaatgtagtctttgagtctcaatttcagcatttatttaatttaatttgaattgttgaatacaaagctgcaactcaacttagattctcaattacgacaatttatgatttaataattctggaacacaaattaattaatataagtcgtactctttcttgaatataggtcttactcttgttgaatatttgggttcaatattcgcttaattagaactatatgtcgtaacacacccaatatgttatataccttaccgaatgcaccagtactacgctaagtaaaaaaatggggtcaatgtttgagatcgtgactatagtacttcgcacgatatgaggatcgttggtaccagtgtatatgcgagattgaagtaaaaagatggaggcaaggatttttatacaggttctggcccttgtttgacaggtaatagccctacttctgttggtcgaagccggtgttgctctttattcatccgaattacacaaatacaatgatttggataacctatctaattgtcatcgacttggcggcatggataaccaactcgtagtcgacgacagagtagtcttcctccccgaatatgaactcgttgagatcagagatggcgctagatccctcttgccggctttcgtaggcaccggattgggtttgtctaggctaatctctgatgtcgatatctggcggtgtatcttggcttgtgtatatgttgtggcttgtggcttgtttatttgtctcctctcctcctagggggcttgtatttatatccatagatgttctcttgtccaagtaaaattaggaagatcaatatgtatacaatctaagtagtacttgttgttttcatgtagaattattcttgtcatttcttattcggaactccttatatatatgaggtatggttctgtataagacttggtatacggtgggctccgtcgagtttagtcgattactatattgggtatgcggtatccataaccctgacattatatgtcgtaacacacccaatatgttatataccttaccgaatgctccagtactacgcataagtaaaaaaaaatgtatttagtgtatcctatatttttgtaggggatatacccttgggtaattttttgctcggtgtgggtgatatattatagcacgtgttgagcatgatttagcgttacaattatcttaatttagaacttattaaattcgaaattaataatcaccaattacatggcattgattcttctttcaatctagaccatgcgccattacaattcagtcatttttttctaattaatgtgtttattttctgaattacgactaatttgttagttagattgtaatatatagaaaatgcagtgaaaatgaaagctaacccattggccatttatagttaccctaccagacggatggatctgggtgcattggtttggtgctgtcatggtgggcttataaacaacattaccaaaccgactggaaataggcctttaaaaaatgtgatttgttcatcatacaagtcaaggcaacagcggcctttcaaggcctgcaaagatgggtttgctcccaccgttttggcccacggtttcctcatatattgggggcccaataatacacatgtattgcattaaaatctagcgccctaactagattaaaggaaggagtaagttcacaataggtccctcaatttgtcagcgagtttaaaattcatcaccaaaccgtaataccgtatataacacgtctctcaactttctaaataaggtccaaaggcggtttggagtgaggttttagctgacgtggcacctacgtggctagtttgacttggtctgcatcctacgtggcggtgacgtggcgatggaaacaaaatataaactttagttttttattaaaaaatgtggggcccacatgtcagccagacaaaaaaaataaaaatagtgggtcccacccttctctctatctcctaatactgctacctcctcctcccctctctaccggccatctctcctctcgcctcttctccctcttgcggcggcggcgctccccaagggattccggccaccgctcgcgcctgcgccaccacctgaacccggagctccggccgaggacgcatgtgatgaggtccttgtggctggcgcgcacgcacatcttcggcggtgggtggccgacgagacgacgaggagcagctgcgtcgctctcctacggcgtcctcaactgccgttgtggcatgggggaagaggggagaggaggcggcggtggtttggttgcgcggcgtcttcgtcctcgtcctcctcacctccggatctacgcttggcccgccgaccagcccacctcgcgctcggtgacagcgcagccgccgccactcggaggggataggacgcggctggagaagacgcgatgggagaggatccagggtgccatcgcggccgccgccgtcctctatggtcacatccggggcggagctgatgtgctccttgatttaccggtcgccgaatgcgcgcgacatcgccagctgcgcgtccacgcggggcatatcgccatgcatctccgtcacgaatccgcagcggcgctcgcgccgtgctcctggagcggctcttggtccacgagcaactgtcgatccgctgtggcgcccgctccgctcctcgctgtcaccctcctccgtcgtcgtccttagcaccttccagtctgtgcggtggtaggcgcggcggatggcgtccatggtatcggtcccgaagccctgttcgcggaggagggtggaaaggtgctcgccgaggtaggtggcgacgtcggcgtcggagaggccgttgaacacgacgaagaggccaacctcattgccgtcctccaggcgatggaactctgcgatgtggctgtcctccatgccgaggggcatcttgcccttcacccttcttcctgtcgccgacaatgacgccgccctgcccctgcccatctcgcgcttgaagagaggagaagagagtggagagaataggatgggagagagaatgacatgtggggcccaccatttttatattattctttgtgtagctgacatgtgggcccacgggtttttttatttttcagatcaaattgccacgtaagagccacgccaatgccacgtgggacaaagaactagtcaaaacagccatgtaagcgccatgtcagctaaaactgctttccaaatcgtcgagggacctcgtttgcactggttttgatacttcaggggccgattatacctggttttatggttcaaggatgaaaatcgaatccggtgtgaagttaagggacctcggatgaacttattcaattaaggaacactgctgcttgtgtgacaaaaattgtcaaaggcctgcaaaggtggatttagtttgaaagtagacggttttaatcttacaggattgatacaaattgcgggaaaaaacctcatatctaaaattatgttttcgaagaatttatctttacaaataaatttagtaggattcaaaaattttcaaaataatcctaaagactgaattcatgaaaaaattactagagataagtgtagatatgaaatacattatcacataattataagtccaaactcaacttcatatgagataaacaaaattgacaaatttcaagtgaatagtgtcatgttactattcatccaaaatttatccttttttgttatacccaaataaagttgagtttgaacttgagatttggtgagaatgtatttcatatttacacctttagtaatttttcatgaatttacaaaacttttaggtataattttcatgagtttctaacacttggcttgttttcatcggatatatcctctacaaagattatgctcatactccttccatcccatattataaggctttgtttcaaggaaagtcaacatttatagcttttgactagtaattaaattaaacttccgagatatatatttggtttcatgcatgtgacattattatgcttgtacttggaagtactataaaatgttaatttttgtagtttttaatatattgtgtaggacaaaatcaatggccaatgttctatagagaccatgtaaaagaagtatacaaaataaattttgagatggaagaagtatatataccctaaattcgaggtgtgcattgaatcaaaccaatcgtagtagtgacatttatgtatctaatgctacttaaaatggggagtttcgttaatcctctcccaccgaccacgcgcagcgcacttccttctaataaggacatgagggccaaagaagtccagaactggacttgcattggagagaaagggaggggcagctaagaagaggtctacggtctgagcaaggccttaccacaagggagccgcgtaggtgcttgcgactgataagtaataagtgattgacggcttaagaaatgactcaataaggacggggacagcgagtcattgaggccacaggggcaagaaagaagttgtatttttgctttaatctaattgggcttgggccagtaggggtgccatgctaccaacactattaacaacaacttcccgagagggacatcctacaaaaaatgatgcaaccgaccaagatgcttccttaagaaccattgctggagagcaaacatgacacaataagagtggctaaagacgaagtcgtcaaaacaatatcatcaacatataaaagcaagtaaattgtggaaccgttgtgatgatagattgaacgaaaacaatgggagtagggtccttcctagttggattggtggcccataggacatataacgaggggtatacattagtaggaaattttgactgaggtcaagacccccacttgcgcccacgcagggcgtgcaatggaaggaacaaagaccaaggggagtgcggtcttttttttttctagttggggtggagggccataggtcatacaactagggttatacattaggaggtaaattttgatggggtccaattttgatgggggtccttcacccctacagtttatacgataaatctgcccttgcacactaagcacgtgtcaatgacccaacaaccggggtccccccgggcagtaggcgcatcatgaagatgccaagtcccgtgtgtcgccttatccatcttgggtctcccgggcagtaggcgcatcatgaagatgccacgtgtcaccttatcctactcatgatatacgctcaggattaaagtgagggtggcacatcccccatctcaaagcaagagggatgcaaacctcggagcacccccaacgagtggagtccttatttaaaatctaaaccgtacactcaggctagcctcgggcccctagccttgccctatttatgttcgatgggacggttatctgcctagagtaggaagcatgaaagacagagcaaaacatacagtagctgcctcccatcacttcacttgagtcaagctcgacatgggcatgagaaactagagggcatggttcattatcgcacccatacctaggcttaccccattaactgccttccaccaggcaattactggagaccctatagccaactaggtgtggtgcatgagtgggttgagcgggggtgcatggcaggcttccgctgcaccccatcggtgtagcccccgctcatggctgccctgaggcctcaatggctttcgttgcatcgcgtggcaagctctcatcatctccaactcatagcaggctcgtagggttggccctgaggcggccggtagagctggcaagaaggggagttgctaacaagacttatcgtaccttatagggatatgaataaaatcttccctcaaatttttatcatgtggtgactcctagaggaagtataagggggggagccgggagaggaggttggaccctgggtggccaaggaaagactaaaattcttaggaaacctagtagagaaaggaagatgaactattcagagtagccaaaacttgtaagatccttaaaagataaaacagcaaaaaaaaaacaccataataggtgtagggtattacacctccgggtgatctaaacatgtataattccttgtgttcatcagtcacagcgctgtagaggggcctgaggcccctcactcacacgcgactagctctgcagccaaaatcacaaaaggggtcccgtcgggtccctgctgtcggggtccattcctcgatagcacacctatgcagaagtcccaaaaaaaaacattcagtttactgactccgtatttgtgttcatttgttttgtacaatataggtcttttaccagacccaaatttttacaagcggacatttggcaggttcgtagacactgacatttcatctaggaagaacagtggtacacgttctccacatttgctcgtatgtgatagtactaagaatgtgatgaacagtggtactagctgactaataaaatattgatgccacggtacctggctggtctgaaccgtttgtttttaatctgactgctctagtgttactgcaaaatattgtagttccttgcattagcagttcaaattgcagaggatccgaatccttgattgcaatagacaagtgtactcatcttttcatcttcaaccatgaaaagatagaaatcaaggtctcccactagacggtgtgggaaatgaagaagccggtgatcaatggaatatgagacgttggggttgccctcataacaaaagtttgtatcattgtgttctgattgccactcaatggacttagtatacttgagtattagcaaaatttgatgtatgccactctaaaaagggtgattaaaaaataccacttgcaactttgaagactggaaattgcggggaaagtgacattctaaaactttatgatatcgactagcaaaagttggcactctacccctcctttataatggactgattttatgggaattatgtaagaattgaatcagatcatataaaatttccgtattacaaaagaattctaaaagaggccatccagaatcataaaactataaaaaaaaagtcactgcttttggaaacattcacaaattttgtgaaatcaaatggtaaaacatagtcagatcacaattgaaatatttcgttctaacacatgaagcatcgagtttcaattactggaacatcaaaaagtgggaaatacattaaaatcctagttgaaacatttcagtctcaagtatgaaacactgaattttaatagttaaagcataaatatttttaatcaaaatatggtatcttgttaagaagaattaaaagtaatgaatataaaatcactgctcagataaatagcgtgtgagcaaaatcatttgaagctcgcatatttataggcaacgggaaaaggaagaggaggaatggctgtaatatgttggaatgttggtgtacggtctgacgcctagtgttgcatcaaacgaccgttggccctcaaaatattcaaacatcattatcagagggtgtatgtcatctgtaaaggtagtggctcatgctaaaaaccctggtgaacttcctgttgccaattcaagaatcttgatgtctctctcaataaatcgtactatttagcgataaatcgcaaatgatatcgtaacggctgagaagtcaaaagaacgaattgctgcaatcattaattatatatgatcaatcaagcaatgtgtactaagattctacaaaatcacaaaacgaatcaagatttgatcacaacaatcttgtaacccaaaaaattttattgcgatacaaactacacgtcgatcacttgatgaggttggttatggccgtgcagatgatcgacatctgcacggagcaccagctacgctgcaccagcggcgacgggacggcggccttggcgaaggcatcgtcgcactggcgcgcgagggggatggcctctcccaccttctccttccccgcagcgtagctttgcgcgttgatacagtcgtatccttcggcgaacacaaaggacatctcgttgtacagctcctggcaccgcgcaagcaacggcttcgccttggcaccggtgcctggcttggctacaagtcccttgatgtcgaagaccgtgtcttccgcgttggagatgcccaaactagccgcgatcaaggctaggccccgtgtgtccgcgtctgggctgaggtggtggttgctcagcttggacacacagaacttgtagctgatgcggctgtcgatgccggccgcggccttgcatgttccttgcacgtccgcgtgtgcggcgccactcaacgtaaggatggcggtggctacaatgacgacgagagcaagggatgatggtctcatcttgttggactcggagaagagaggtggtcacttttaatggtggattgtttgacttgcaatcttagtactggagtggagtgaagtggattgtttggcttacaatcttagtactggactactaaccggagtggtttattataggcagaggtagctgtagaaacgtattatatacagctgcatgagtaatgagtattaaattactgccaaatatttgatttcgtttcattatctattgtatgaaaacatatgacatatcttagctggtatttattgtgtgaatatatataacatatcttggtgggatggtcatatttttttttagataaatgctatcgcaccatacgccaacaaaaagatgaattaaaggattctaaattaaagatacctctgccgagtgagagttgtttaggggtaaaataagatgaaatttaatgaggtagctagatggaagaagcataccttgtaataattgtgaacaaatattttacacttggattttacacgaggagcgcgtatgcgatgatcttgcctaaatgattgtattttcccaagaaggaattatcaggagcaataatttactacatattggagatttggagtgttaaatggtacaagtgttgtgcatactccattactcctacaggatcaggatgaactgtgtgacaatattcgcaatatactccctcagtattgtattttaatgccatttattttttaaccaatatttgaccattcgtctcattaaaaaaattatataattataatttattttattatgacgtaatttatcatcaaatattgtttcagtatgacataaatacttttatatttacacaaaaattttaaataaaacagataatcaaacattcaagggagtactatttctttcatgctttggagtactatttctttttcatgaaaacaaggtatgttctaagtatgttctgataaaccaggcaatgcacatattatgtgatcacatattatgtgatttttgaataaaccgaacagtcaaacgtttaagggagtttaagggagtaccatttctttcttatgaaagcaaggtacgttgtgagtatattgtgataaaccggacaatgcacatattgatggtgtttgaatgtccttaagatgaagattattaagttttaattattacaaacttgaaaaatggattaacctgaaattttaaaacaactttcatatataaagttttcgtacaaaacgcactattttacagttatgcccattatcctcgcaccattttccaggttttcatctcccaagtttgccatgctctcccgaataaacaacgaaagcagtgtccggcctgtagtggcatatgctcaagtaatccaacaggagtatgttcaccggtcgaagcagataacgttggttacattgaggacagcatgaattgatgcagaaacagagttcaaaactggtttaaataatccaccgaatgaaaagcacagaaacaaaatagtccaatgcagacggtaacatctaggagagcagagtgttgtcggtttgaggccgcatgaagattacagcctcctaccccttctaccaccctttctgcgtgtgctatcagtcggcactggagtaacatcctctgtatgacagaaaattgacaagacgtcatcagctgaaaattacaatgaaacagcatacattcgaaatagagttcaactaggccacaaaagaacagatgcaagtacagatgtttcttctgtaaatttccattcgagtaaatacaaaagaagtgttcattgccttcctattatcaaggaaaatacgaacagaatgacataaaaagcaaggaaaggcattgccaaattatgctcttggaaaataagagtatgcaagtaaaggtctgttatcccaactgtaaacttgagcaatgatagaaacatggtcgattcatgactgaacaaaggactgcaggaggattcacagctacttattacagttacactgagaatcctatataatatatacactttgaaaggccgtgacatattttgagaaaccaaagcattatgttaatatgagacacttgttgaacattctagttgcgctaacatttcattgactagcattaggttgatgcatgtccatattgcatacttatattcactatgttcattcataccacattcttaaaagtgaattataacttatacagtcgagtgcaaaataatgctagaacaccagggagtactgtacggtaaacaaaccagcaatataaaaagcatgaatccaaacgatccaaaaagaacaagcagatttcaattggaatttgtctccaatcaaatgatcttaccattctgtctaattgattcataatgtagagtggttaaactatatattatttatttgttgatatagcattgaaacaagttataaactaaacaatgcttatacgttgatattttacatgcaggatttgtttcaataaaattttaacattgaagtgctcctcctggtgcagacttcatgctgtccaataatattagaacagaacaggccaacagttcaaacagaataaacaaataaaccaaccatcatccaacaaatatatcagcaagcatcatgcagaaaaataaatgtttgtatgcttaccaatacgaccaatcttcatgccagatcgagcaagtgctctaagtgcggactgagcaccaggaccaggggtttttgtcttgttaccaccagtagcacggagcttgatatgcaaagcagttattccaagctcctacaaaatggatacaaggcattaatcattaactgacaaacaacagtattatcttgaccaaagtagggggataccttgcatctttgagcaacatcctgtgaagcaagcatagcagcataaggggaagattcgtcgcgatcagctttaaccttcatgccaccttgacaacaaacaattaacatattaaaacaactgaacattgttataacaaagaaaatgataacagcctacaaaagacacatctagaatgaatatataaattatattaaatggtcaatctgatattaatcttaagcatgtaaaattaagttgtgatttcacccatttaacttaagtccgtcgcacaaccggttaacaaagataaccacagaaataattcaagtttataaagaaaatgacagcaacatccacagtaaagacaaaaatgagaccatttctctgaaaacaaaaacaactattttctaatgactacacgataatttaaattaactgtgaaactgcctgattgctatcatgaactttttaccaatctcaactgatatattcacaacatcctacaataattacgtctaacagaaaatgcggtaataagttatatatacacacagagcgtgggcaaataaaaatacattcttgaagaaaaataaaccatgtccactcccataatatagacatctccattcaattcaccgaggcttcccagggtgaacagctcaggcaatcagcacaaaattgcgactgataaaagtccgagccacaccaagggatacacaagctgagatggagatacctagaacaaaacaggaagagggaaggaccaaagaaaaactccgaggtccctcattgttactttagcacagctatgactcgaaacgctcccacgtgacgaaagggaggcgatcttaagggccgtgcttaacaaatgagcaaaaaaaaaacatcgcgacatgaactcaaaaacacaaattgtctccaccatttcagacaataagcaacccctaatgcatcacatcggcatagagagcgagataaacggggaaggggcttaggaggggaggattttaccagtgatgcggacgagcgtctccctcccggacagatcggtgacatgctgcaacgcaaccaaaatcgcacaggggtaagcaaaaaaaaaaaatcccaatcgaccaatcgaacgggaaagggggggaggagagggagggcgggatctgacgatgaaggtgtcgttgaaggaggcgaagatgtgggcgacgccgaagacgtactcgccctcgcgcacggtcgggccgagggtgacgttctcctccttgggctcccgtgtcttcttcctcccggactgtcaaccgcaaacgcagcaccatggtcatcgcaacgcatcattcggcctaacatgaggagagcagagagagatagtgtgtgtcacaggaaacataccatggcggcggcggtggcgacggcgacgggggcaggggagagtggagaagcggcggcggcggcgataaaaccctagctcaagggacggctgctggagcaattcgctttatataagtagtgttcagctgggggcatatgggcttcggcctttgggctccttgtcgtaacgcggcccagtatatgctagggtacgtcttttccttttagttttgcaattgagtctatcttgatttattctcaaaaaaagtctatcttgattcctttatctttgaaaactgtgcctagtccattttcaaagatggaggaggtattataccggttttgcgtttcaaggagatgattcgatcaaaggtatggggacgtaaaatagacttattcctttagcttttctcaagatgtcttgggctcttgtcttgctgtggtttgctttctcatatcgttttcttttaaaacacaatacaaacgcaggctgtgtgatagttcgtgtgctaaaatttatttgaagtatacggatacacatttgaagtattaaatgtagactaataacaaaacaaattacaaattccgcctgtaaactgcgagacgaatttattaagcctaatcaatccgtcattggcaaatgtttactatagcatcacattatcaaatcatggcgtaattaggctcaaaagattcatctcacaatttacatgcaaactgtgcaattgattttttttgtccacatttaatgcttcatacatgtgtccaaacatttgatgtgatggaatttttagaagtttgaagagaactaaacactgccgcagtcacttacaacatatgtacgcttgtcccaatgaacacatactctggatgcgttcggttggcctggctgtcacagcagctacagctgcggcagttcaaaccggctgctatgtgtagccagttacaattgtcgcaaccgttgtggctacggcaactagcacgttctaacatagcctctattactatgagtacctctaaaatactataccagcatattttgatattgataaagtcaagtcatcacggatgttttgctcttaacaggtacattgtttatcattgaaaacataataaactataaatgctcatgttaagtctagggcttcaacccgagagagatggttctaccacaagaaactcaatcgttcacttcgttttccgaaatcaattgtgtatacaagtgtgtaacgcacatgtttcttgtaatcagaataaagttaaaattagattcgttctatccctgatctacggaggaacaacactagaagtgatacgatgatacgaaacatataatgcaaaatgcttatgcgagtattggtgcaagaaagtgtgcttcctgcaggctgcagccggaaattttccacgtagaatcatgtgtacaattattttttttaaaaaaaaatcatcatgtcatgtgtagaacaaaaattaaaaataatcaggtgtaggaaattaaaaatagaattgacagctgtgggatttgaacccacgcccattcggaccagagcctaaatctggcgccttagaccactcggccaaaccgtcgcgttgtgttcgacgtgcgataagtaattccttaaatctttacaaaaataattcggaaaaagttccacagacgagagttctatactagtcacagagttcattcatcgtacggttacagcttttggctttcgttgtgtgatctgaacttcattcttcaggtattcaggcctatcacagcaacacaaacaaaaagggggggcagccaacagtacagctagaatacacacttccagattccaattgctcatcactaatcgaaggggtctatccgtgggtcatgctcgcttgccattgccgttcctgtgcacaagcaagttgggcacatcacctgaaaatagcgaccatgtacgtgaattagggcagtttatgagtttatcaggttggggaagtagatcagtagaacaagaaatgaaatggcatttctttcctactctgcaacctaaaaggccagttcaagataaacttgcaggatggttggcagaaggagtaaacaaaaagtttggtcagcactgaatttaggcactaagtagcatatgaatagtatgtgctgctccctaatcatttaatcctcttgtgtacataaactgtttagtttctaaatttaatcttgttgacggtatcaaactgagttttctgaaacgaaacagaattcgatagcgggtacctttccagctcctgaacaattggggcacctttcggttgtagaccacatattatggccgttgtcacatgaaagtgaaaaactcttgctgttcaatagcattccacttgcagaacagcgagcgcatggcaagtatcctatgatgcagaatcaagttcaggtatgagaatgcagtaagataatatcaaagcctaaagagtaatgatatcaggaaaagagagagagagagagagagaaaagaacaaaagaaggatcgtgataattggtgttagcacaagaagcaaaacaatgtttcaagcatattccatttttgtatttggtactacattaggggcatgaccgagccatgttaggggcagacggatggtaaggcaattgattataccagtcccatggcaatatgtacaccttttcttctcttgctgcctgacgtttctaatttcaaccaacattaatgccgagattacaccaactgcaccacctgaaaaggatgccacaatgggatctacctgactgaacaacaaccaaaaagcatatatcaaatcaccaattctaatcagtaaacactactgaagagtctagtaacaaaaatttcaagcaccttaattgaagaggcaagtgcatggtccttataaaatcttcataagatgtaccacctagccctaatttcagctcaagctgcatgaaaaacatacttttaagagccatgatatattaattaggaaggaagtatgaatacagagacaaagctgcacttactactggggctatcaagcctccaaaaaagattatcccagttatgaatgagaatgatgtcaaatagagttgtttcattgtcttcggtgactacatcaggaaaaagaaaggaattaatagagattactgggaaaacagtatggtaaatttcttaaggagacttattgagggccggtaatcaccgtattaggcaaaaagggaatactagacgggatttcaggcatttcactttcttcactgcttgcacctctgctttcagaagttctgattcgctgctgcacccgcaatcgtctaacctgagaaaatacccatattgtggtgaactgcaatctgctgtttcaacaagctaaaaatggactattaaactgaagagatgaagttcatatatatactagacacctcttccatcaaaaggaaaattttgttacggcggctcctgatgttgtcttgaatctcttgtgattgcatttgaacaaagtcttgtatagtctctgggccttcaattatgcaaaaactgtagaagaaaatttttttaatatatttttctcacacctacatttttatgcaaagataacaaagattatccaatataatactaggtatttgcagaaggtgtatacacttaacaatacttgagaactttttgataggactcctcaatatctaattcatacttacattactcttaccatagcgccatttttactctcaacaactacattcttgtgatgacttccttgtaatcttggtcaatttttggatacatggtttcctaagttgcaaaaaacatttattttttctacgatagcactacaccaggcagccaccacagctgacagatcactaagagcatatgtacaatctgaattttaagtgaaccatatgtacaatctgaatttacgagttttcaacatgttgttactgtgcaattgccaaatcgaggagtagctcaagaaccccatccatttcctagaacagaacagaagaaggcgttggttttgataaggcagctgctacagtaacccaacctggataggccaccgtcgccggccgccctgggctcgccggcggaggagcaccgccgccgcaccagccgctgggcggacacggcgcctcccgtcaccctcccccataaagtcggaggagggaccgacaccacgaagaggaaagaggacgcgcgcctcgccgctggcgctgccggtgccgcagcggccggcggcgcggcgaggcagtagtacatggccggccggccggccagcgactagttgcaggcttgcagctgcagggcgctgctggtgtatggtgatgctggggcgtacggaactatgggggggggggtggggggtagtatcgcgacggatttggatagacgctggccatgattcgggtttacggacccctgtttaccacgcggttggatccgatagggcgcgcggtagaggacagatggggagagctgggggcatcttccgccagcggaatcggtattttccgcttggtcgcgccggcgttgtgcgcgcggtttggcggagtagacgagtgtgaaggactgaagaagtgaagggtggactcttcacaaattagatttgctgtgagcggtgcctctttatttagacttataaatcaatttataagttaaaaaatctaagactaaacaaacaaacagcttattcgtttggtctttttgaagccataagccactctaacactattaagctaaaaactagattaaagaagctttttggctcatatgaagtagatgtatggctccaccactaaacttaagacatgaaatccaccagcttataaatcatatggagtataagccaataagtctaagccagctttacatttttagttcattttgtgagaacgcttcacctaattccgctcatgttttagataaagctaaaaactatttggttggactctagctataggagagttgaagctggagctgtgtcaaacagttcctacactttcacaatctgaaacatgttctgagttacacttcggctgagttcgtttctcagggttctcctcatattttgtgtgcacgcttttggaactgctaaacaatgtgttttttgcaaaaaaaaaagttttatatgtgttgacgaccaaatttggtatgatgtgaaccaggttcgacattgggatcgaggcggattcgataaagggatcgatttgaagagcagagtatgcgtcggctgcgaaggcatcggctggagtgtgcattggttgagatggatcggacagaggataaaagatacagccgatagaggtaatgcaatcgattccgatgaagatggtttcaaggccgtttctagaattgttcaaagtgctttacagggattgccatgatggagataaagctctcggtttaggcagttgtatctattaattaggatattttatgtaatttccttagagatatgtttgggcaaaagacttatgatatcttagagtttgttagagataagtgtcgtgtccggcaaggacatattttgtatctctggtataaatatgacccgaacccatgtaatcaaacaacaatcgttcaatacaatctcggcacatcgccaccctttttactttcgtttatttcgacgagttcttacttttgagttgagctgcatcgattcgatcttcaactaaaggtaaaacttgttatggcggcttacgttatcggggttaatgcttccatctttatgatactttaaccctatttctgtaatcagtcgagttatcatatatctgttgcaatctatgttagttgcactatatagcttgttatcggctggttcttatcattagggaataatcggtagagttatattttgttattaatctagattgtatcttgtatctaccatctcttgtagattttcatcattctgtttagatctcatacttgtctttatgcttgatgctgcatcggttgagttcgatctgttaagttgtatttataattatgatatctggcttgttttatgatcattgagagagatagtatcggggtttcaaccgatcttacctgacttagtcttatgttttacatgcttaattgatatgctaagtatgccctttatattaagatcttattgcaataaagtatattaggcttctgtgtgatatattctatctgttttaacatcttaacatagagtagtatcggagtactagccgatacatgctagatctacctgatcagctatgctataagcgtttataacctttatgttaatgcatacttcgatctaagtgatttatactgtctcagtatggcgaccgatctatcccaatcacttggtttaaatatacatcaacagaaagattatatagcgttaatatctacagccgatcgagtagatttagtcttatcctgcttatttaccactaccgatcgattcacatatgacatcggcttgaaaataaatgatatgtcatcggcgactggccaatcggctatcgtttacggatttaaccgtggtttctttcgtctttatttcttgttgattgcaggatcaaatcaactggtacgctcgcgaatctcaaggcaagattttggacctgtactggagctaagcaaatctcctaggccagtgtgtgtttttcgcatcaacaatatgaaagttgctttaaaaaatcatatcaatccattattcaagttttttccagctagtacttaattaattacgtgtcaatgaaccgctctattttccacgccggaagagagcgttcccaaccgatacaaacgaacatagccttatacaaacttttattgcatcatttttttacttgcacgttttctaaaacgttgaacggtatgttttttaaaaaatatatacaaatgttatttttaaaaaaatcatattaatttattttcaagtttttctttactaaaacttaattaatcatgtgttaatttaacactttgttttgtatcatgcattaatttaacacttggtttgcatactgaggaaaagggttccaaaccccttaagagaacacgtagatttgaatccatcgactacgatatgattactaaagttgtcgatcccagcagatccgaggttgttactactgtgtagtagtagtccttttttccttagagggaagggagtatttcttgattggcaaccacatcaattggcatgcttaacacctgttagctagctaacaaggttagacggtttattctctaggtttggtctattctattagagtgtgtgcacacgcaaaaaagattcaaaattttaatttagtatagccaactctcgtgatagcaaaacaaatattgtctttagccacgcttgttggtcatcacccttatgactaccggctaccacccaagttttccctatttcttagctatcattaacgcttctcatcattaaatagtttcttcctaccatgaacacttatattaaaggctccgtcacacaagacttgtatgttcgacaaaatttcttgtcgttgtcctttctcatgttagaggtgctctctcaacaatttaccaattgcccattgttcataatcccagtttgtattcaaagacctgtaaaaaatttatgaatgatagccaaagaaatggctttgatgattatccaaattgcttcggaaattaaaatagaatacttattgttgtttaaataatactactcatcacttaggttttcttcgtatgctcgatgatgaatatgatgcagcaaaaaaccatgcaacaatctcattaaattgggtagcataggtcaatgatactaatttaaaatattcttttctacaattttgaaaataggacaatacaaacattcttttctaaacaaacaaactatactaatcttactcagtttaacaaaatttacttcattttggttgggttgctctaagattggcagcaatgcaatgcccaaacaacacacgagggtcctcctagttgcaagccactacagtgaatcctcccaaaaaaaataaatttaatatcaaagtgggcgcacatagtccacatgccagataatagtattataaactgataacatatactccctccatacttataaaggaagtcatttaggacaatgtttaagtcaaaccttgggaatataaatcatgaataactctcaagttgttgagtttgaaaatgtaaaaactatatgtatagatttttcttgaaaaatactttcataaaagtatacatatatcacttttcaataaatattattatagaaataagaagtcaaaaatgtgttttggacaccgtatcgctgtcctaaacgacttcctttatgaatatggagggagtactacacttgatcttatccaaaggaccaagaaagatatgagttgcaacaatgctctccaacccccttttatatccgccatttgcccctcctcggctgtcaacagttcaacacccgatgtgatactaaaaggaaaaaagttcactttgacttccttaaaagtgatctgaatctaatccgtgactctcaaccgtaaaaccggatagcatgactccctgaattattcaaactagtgcaatttgactcccttagcggttttggatgtcggttttgctgacgtggcggtgttgacctggtcttcatcccacgtggagcttatgtggcattacaattaaaaatattttgtgggacccgtctgtcatttacacacaaaatatattgtgggacccacatgtcatcctttctctctccaacccttcctcctccccctctctctcccttctctctcttttctcctgcagccgcacccgctgaacatgccggtgcagttgaacccgtgcgccacctcgccggtgctggacaccgcgatgagcccgatgaacctcgtctagccgttccttgacgcagtagtcgatggcctcatgcagcccgacgcccctgtactccataacggcggcggcgtcgcgcgccagcgtggagcatatgatggccttgccttctcccaacccgatcaacggcgagtcgccgatgcgcccggtcatcttgttcatcaatccgctcgtggacatggccgccgcggtatggccgtttgagtgcaccactgtgcaacccactgtctccggcgcggcatacggcagtcaaacttcttgtaccaattaatcaaaaggatgtcacggttagatgttagcaattttcataggcgaattggtaacatgagtcaatgcgctgatcgacgaaccaagatgctgttggcctccttggcgagcttcagcatgccgacgttgtcctcggtgatgaagtagctattgtccacgacctcaagaccttgcaaacagtgaccagaaagaaaaaaatcagaccagtccatgacctcaagatctgcaggactcgggtggaccacgctggtaggacggattcgtcctacagctgctggtcctgccaaaattcgactggattccatggcggccgcgcattgctaccccacaccggcgctgcacttgcatctgctaggcaacgctgtgcacatgcatgttctccgagcagaaagaaacagaggcggcaccccctgccggtgcagaccgggaggcacggctggggccggcagcgtctcaggcctcgccgtctgcattagccctctcgttcgtcctagcctggcgcggcaccatcgtgggggaggccaccggccggacgcccccgccttctccggcaagctgtggccgtcgccactccaccgcctctcctttggctctctgccgtcgccgccgctcaacccgctcaagttccttcctccgcgccggccctcaccctgccgccgccgttgccgctccagattccgcaccgaatctggtggaagagaaacatacagaggagggagagagagaggggggggggaaggaggatagatagaggatgacatgtaggcctcgcaattttttttcatgtgaatgacgaatggagtccatataattttttattttaatgccatataagcgccacatcaacaacacagatcaagtcaacatcgccacgtcaacgccacatcagcaaaaccaccctccaaaaccactgagggagtcaaattgtactggtttgaatagttcggagagtcatcctatccggttttacggttgagagtcacggattagattcgggtcatttttaagggagtcaaagtggacttattccatactaaaaccatacatatcccgtcctccctttgatcccaccgagctcggtcttgccaactctgggccggcccgtttacagcaatcggtgccctccttttcgggaagtacatccctgcaacggcaaaaggacctccttttcgggtacgtttgcgtccagagccggtgcgcgagccatggtggcggccggcgttaaggcccggcgatctgcccatctgcccctgcgtgcgcgtactcaatgctcgatcgcgcgtatcctcgtactacaaaaaggcgcacacacacacacacacaaaccgtagcacgtagacacgtatagccgcgcgcgtgcaacggtgcaagtgcaacaaccagtactacactcgtcatggctcctcgcctcgcggtcgtcgtcgccctcgccctcgccgccgccgccgccgtcgcgcacggcgaggccggggtgcgcggcgccggcacgctccgcggctacgtcgcctgcctcgactgcgccccgggccacgacctctccggtatgtaatgtagtaacacgcggtcacgcgcgcaccgggcagacatggtcgatcgtgacgtcgcgcgcggtggctgcaggtgtggtggtggcggtgagatgcggcggcggcgatggcggcgttggacagctgcgggcggcgcagacggacgagcgcgggggcttcgacgtggccgtgccggcggccggcggagacgacgtcgacagttggcggagccacccgcggtgcgcggcgagggtcctcggcggcgccgagcagctctgcgcgccgggggggctcgccgtcgcgcccgtggtcgccgcgggcggccgggagaagcacggctcgtacgcgctggcgtccagcctcgccgtcttcacgaggtgcggcggcggcgccctagcgtcgtcgacggcggcggccaccggtaacggccagagccccgcgccgccgcgggcgcgcagggcgacgccgcgcgccgggcgcgccacccctccgccctacgccggcccgggccttccgctcatctacttcttccctttcctgccaatcatcggcatcccctgaatgtactggtcggcgtcgcctactgcttctgcttgtgctactcttatgttcgggtttgcaataataatcttacttacctacttatagttattatctatgttactgttactgtatgattatgtaaacatctaccaataagacaataatactccctccgtttcaaaatgtttgacaccgttaactttttagcacatgtttgaccgttcgtcttattaaaaaaatttgtgaaatatgtaaaactatatgtgtacatgaaagtatatttaacaataaatcagatgatatgaaaggaataaataattacttaatttttttgaataagacgaatggtcaaacacgtgctaaaaagtcaacggtgtcaaacattttaaaacggagggagcagaagatatggcaccagttccaggcttccagaagctcaagagtgaacttttctttcttccggcaaattttaaagtgcaacaaaatgtggggaaatcgttgtaagctttcgaggaaatgtccctttatttgttcaaacactattcaaatagttgttaattttatttttaaaaaatgacaacattcataccatttgacaatgtttatctttctttttttagaaaaaaatacaagttcttaaaaatatgtcacattatataccagttgcatcatgtattcattttggtctaaccatttaaaaaatagtcaaagttaaaacggtaaaagtcagtgccaaataaatgcaaacgaggaggtaagcacaagtcaaaaatgccaaataaatgcaaacgaggttgtatgaggtcttgtttgctcaatgtataactagaaatattgatggcacagttggaaattatagtggtagtctgcggagttcactgtttgctattacaacggttgtgtttagtttccttcaaacttcgaattttttcatcacatcaaatatttggacgcatgcatggagcattaaatgtaaacgaaaaaacaattgcacagtttgcatgtaaattgtgagacgaatcttttgtgcctaattacgccatgatttttgacaatgtggcgctacagtaaatatttgctaatgacagattaattaggcttaaaaagattcgtctcgcagtttacaggcgaaatttgtaatttgttttgttattagtatacgtttaatacttcaaatgtgtccgtatacttttaaaaaaattgaaatggagctaaacacgaccagcacctctacccagaatcttatacaatcccctatctctaaatttacagaatttggcgaaaaagtgtgctctagcaactataccatcccctattatgaggcgtcctcagttcattccctcgtattccctgaatttgggcgtatgatctctatcttctatccgctcatgtgattgagcgattcagctaactctttcccacaccaccccacactcagtcacgcgtcacgccacctcttctccagcgtcgccgcaactcccacgcctcacccgctgcgaggagtttgtggccacgatgatcagtggaggcagctcccgccgccgcaggttgagtgccacaaccctccatatctcaacaacgatgaatccaacatttggtgcatgaggaagctgcagcagctgtgatagggtgaggagagaacaaccgacaaccaatatagagagagaatactgttgtttggaaaaaaaatagtagtagtaggatgtgacatatcctaaaactacgaacgtggatagacaataatccagatttatagtcctaggatatatcacatatactaccagcaccaatataaatgtgggaaatgctagaatgacttacattgtgaaacggagggagtatattatattacacttctattaagacggatggagtaggtaagttggtcgagatgttgttacacttaggctctgttcgtttcctggagttcccaactcccccatctcattttccgcgcgcacgcttttcaaactgctaaacggtgtgttttttgcaaaaagtttatatacgaaagttgcttaaaaaaattatattgatccatttttgaaaaaaaaattagcaaataattaattaatcacgtgctaatggactgattcgttttacgtaccggagggatgggttcccaactcaaccaaaaagaacagagccttagtgcacttcatcacatcaaacagtggtgtccttcgactcgagcgcccagagtactggaattggacagcaacacattgattcttgcggtgtcacaatccatagtttagttttaaaaacttgtatgcattaaatcggacagaattggatcaatttgatgccacagaaaatttgatagggttgatttaatttgatgccatgtaaaagtaccgttgaaggttgggcaaagctttggcagcgccaaatcagttgggaatgatggaaaagaagtgtatggttgatgtcaaagttaagttattgttatcaactttagtagcacaaaatgttgagaaacgaagacactacctaatacccaattttgttgcgtagggatggaaaaggaagtgtttgatatgataacgaaatcatgttatttctcatataaacagaaagatgggtgttaccaaaagtctgcaggatagcatttagatggagcatttgattttctaactatgaagaattggcaacgagccaacgaacgagaccgaagtctccacacacaatttcaagtccccgtttcagacaaaaaatgaaacaccacgcacacttttgcagcagtcacacagagcacggtaaaacagcctattctcggtatctttgccacactccccaactccaagtaaaattctccataaaaattgcaccttatgcactacgagatacaagagaaccttatgctaatagggttcttattccaagatggggcatggtgaaaattcatgcggcatcagcattgtgccaaccctttgtgcacggagggatctccataaattcatcaaattccttgacatgaatatcacaacatttccactgcaaaaatttttaaaaagatgtcagagtcagtgatggcaaaaatcaaggaatagagcaaaacaacaataagtttgaaccaaaaacatacccctctaatcctgtcgcgaaaaactgcaggtcctggatggtaatcgcatgcttcatcatgattatccttctccttgtaggttttaccacatcctttgttcttacaaaccctaggctcattcagatcaatttttttctttggtggtggaactgcaggcttctcaacaggtaccatgttagtatcactggtagcggttggtatttgtgccttgggttgtgatcctgaaaaaatagcagtgcataatctgttaaattaaaagttacgatttattctatcaacacataaaaatgcatagggatgtcagtcgttaaaataataacgaaacaatcagctgttacacccaaataggggatcaatcagttgtatccaagcattatgcttatagacagaaactcaccatggtcagagcaaaagaaaccttgacggcaccttgagcaagtgtcagctcccacactctgcttcgaagtctggactggaactgcctttgatggtttagtaggaactgcttttgtgattggtttctcagttgtgtgctttccagttttgcacctacacagcagtacagcatacgattcatgcattcatgcttggttttgctaaaatacacaacaggccagcccagatggtaatgttcaggttgatagcacatagttgacttatgttgtgggtgcatgctgtgaaaaggaaatactagagagggatccttacccaggaatagccaaaaataggctaaaatcatggcttttttgcttacagcaactccactgtttcatgccatcatgaaacataggctgaaaaaaaaaatcttagaaaattaacctatgcatccttctagaagtaccctctcatgcaaagaagaaacacttactccctgcaagaaaaaaaaaaggagacagtggtcagaacactacagtggaaaattggaaataaatatagtatttggcagtagacaagaaaccataaagagagttagcaaacatattatacgagtcttgtttaaatatgttgctttattcgtcattttccaaaaaagaatgggaccacatttaggtattctcttatactagctgttgtgtatttcttctagaccaaatgcagtaaacatgagtgtgaatttggtgtttaaatattacaatggaatttggcatggcatcacaaagttagcaatgtgatttgaatctttggagacaaaagaaaagaattgcttgaaaaaattaaccattatttcttccattgttatcaagagatattcacaattggaaatagaagaagttgtgaagaagttttgcagcagctgtttgtgtacttaatccttttttggtacaacatgggtatctgacccttagacacggtagggattgaaaaagagaaagagaaagagaatgtcatatctttattccaaattaattttgtttactctctgaagggaaaggtagttctttgcctcttttccttttgctttttgtaaatagtcagcactcatgtgagccatatccaaaggggaaaaaaatccctcgccacacatcagacacattgcccatgatgcctcatcaagaggcagcttcaaggtaccaatatcctaacccaaataaggggcaaaaaaaaaaccacctaatatcacgtgtttgcgacaactacaataccttttgccaatggcatcaataacccttctgattgaatcgtgtaatccaatccactaatctactaatctactatgagtataatcgtgcaatccaatccactaatctactatgagtaatgagtgtagtccaacatatctctatatgacactaaatttcattattgtatatagaactcaaatattccccgctgcccaattcgtccccagaagtttcccaagagcaggcgaagcccttgaccccgccattacagattcgaactgcccaacttccccctagaagaacagactcctccactcccgtaatccgcggggcaattagttagaccccatgagatttagaaggggaagaaggggaggaggaggactcacggaggggtggtattggcaggagccgtcggggttgttgtcgtcggtgaacgtggcgtcgcagcctatccgctggcaccgcgccggcgccgatgcgggggcgggggcgggggcgggggcggcggcgctggtggtctccgcctccgtcgacatcttcgtcttccccctttctccacggacgagacgagagacttccgctgctgccgccgccgcctgtggcctctctagtctctactacttctgcggcgggcacggtgcacgggataaataaagggaggaggcgcagcgcggtccgacccggacccggacccggacacggacgccccaggtcgctgggtcgagccgttttttgagttcgcatcgcacacggggatggtccggtgggaccggacccggaaccaggctagacgcatgaaaacggacggaaacggttattactccctctgagggcatgtttactttaatgccatttttaacataaagttactaaaaatatgactatatttagtttactgctaaattttgatgactatataagaaatcctaccaaaattttaacaagttaccaaaattttggcaactatgccaaaaatttggtaaggttttttttttcattaaagtgagcatgccctaagtatgcgaatctagacaaaatctagacaggatatataagttcaaccaaaatcccttatatttaggggtggagtgagtaataaagtaggtagaagtaaggcctaatttagttggggaaactttttggatttagttgtcacatcggatatacaaacacatatttgaagtattaaacgtagtctaataacaaaacaaattacatattcagacgactttattaagcctaattaatccgtcattagcaaatgtttactgtagcaccatattatcaaatcatggcgcaattaggcttaaaatatatgtctcgcaatttacatgcaatctgtgtaattgagtttttttcctacatttaatactccatgcatgtgtccaaacattcgatgtgacagcgtgaaaatttttattttgggaactaaacagggcctaaatggtggagggttgtgattggataagtagtggaggtaggtgggaaaagtgaatggtaaaggattgtgattggttgggaagagaatgctggtgaagaagttgttatattttgagacaaatcttgagagatataaattgttatattttaggataaaggcactattctttttcgaaatcggaaactagttttatcacgttcgttttttataattttttctcaaaatcggatttgaaaacccgaataagaaaatagaatcgaatatagatacgaaatgaatatgaaacggaacaaatatgataacaaatatttgctaaatataaagggaaattctacgtgacggtgtcccgttcgtacaggatggtacctctgagatatcgcttgatacctgctaggtatcggcggatacctcgtgttcaaacatgatgatacatatgaggtatcgcctgatacttagtaggtgttcggacatgatgatacctctgcggtatcgcctgatacctagtaggtgttgactgatacccagtataagtgtgttgatgtaaaaacacgaggtctgggagatctgcttaactccagtgcaggtccaaaagcttgcctttaggtgtatgagcgtgctagttgatttgatcttgcaatcaataagaaataaagacaaagaaaccgcggttaaatccataaacgatagccgatcggctaggtgccgatgacatatcatttatctttgagccgatgtcatatatgcatcgatcgacagtcattaataaataagaaagaactaaatctactcgatcggctgtagatattaacgatatatagtccttatatcgatatatacttaaatcaagtgattaggatagatcggtcgccatgccgagacagtttatatcgaaatatatattaataacaagactatatatgttcatagcatatccgatcaggaagatctagcatgtatcggctaatactctgataccactctatactaagatagtaaagcgagtaaaatatatcaaacagaaagcctaatatacttacatgcaacaagatcttaacataaagggcagatttaacatgtcaataaagcttataagataaatatagtcaaatcagataagatcggctgaaactccgatactatcctaatcggcaaccaaagacaagctagagattgagattctaatcacgactcataaggtcaaactcaactgatgcagctataagtatgaaaagaaggacaatatctagacaatcaagtcgttggatgtgtcatagagtggtggatatcctatataatgtaggtcaacatcggtatttaacctaatcggctgccttctgacagattttagccgattgtaggttggataacgatattgccggagattatataagatatatgataacccggcgaattacataaacaagattagagtgtcatgaagatggaagcactaatcccgagaacgcaagccaccataacaagttttacctcttgttgaagatcgataccgatgtagctcaacccgaaagcaagaactcgtcgaaacaaaacggaagtaaaaagggtggcgatgcgctgagattgtatttgtcggagatatgggcccgggggtatgcgaagtgaggggaatttaccttcccatcctgtcgcgtgaccctacagcctggccctacccccacaccccgtgacttgcaggagcggccgggggacctcggggtgccacgtcatgcccctcgggccctcgcaccactttgccccgaggccctcgcccagctgccatctggcgggggagcaagtggggaaggggcccagcctgaaccacctttaatgcgcgcagcgccccaactgccccatgccgcattcaatgcagtaggggcagacgtgcggcgtgcccgactagcgcgcgtcggtcaggaatgatcgatctgtgaccggcttgtcgccggtcacatccgactggacggacggccgtgcccccacgtcgcatctgcctccggtggagtggaggtaggtatgacccgtcccatcggagggtcattcggagttctccccacgaaagggaggccaccacaagtcttcacctattaataagggaatgacagggctgtcccctgtgtcaggcgagggacgacactgggccccactcaaggacaagctatggcttagcttacaggcgaaggcacgggtcgagattcggtcaagatagggtgggtccccacccaataggagagtaggtagaggcagtgcatgtggtatccccttgaggtataaaaggaggaccttgcccaccgagaaaggggacgactctcagaaaacctgagctctaggaaaagggaagcaaagcgctctccggagtttaggaacctttgtaactctcagtctaaatcccatatacaggagtagggtattacgcttcatagtggcccgaacctgtataatctcgttgtgcacacgctagctagcagccttgggggcggagacgcgatttctagaggcgggccttttcccctggccgaactcacgaaagggggatcccacgatctcctggtagagaggatcactcctcgacagctggcgctccaggtagggggatttcgtgcgcttcgaagggaagtcgtttccattcgccccaagttttcctctggccccgacgatcatggtcgaggttttggaggaagaggtggaggtgcacacccccactccttccgggagtgaggatgccagcgggagtcacgatccgcgtcatcaccgacgcaactctcggactccgcccctccgcgacccctcgcggagggaggatcccgcccgatcgggtggctcggccctctccccgcctctggacgggggaggccacggcacgttagagtgggccgccgcctgacctatcgcgacggtagctcgccccagggcgcggttcaggcggcaggagccctcctgcggcaccctccggtgaacacggagccggaggcccccgtccaacgatagttggacgacgtcgccaacttggtcaccactgcccagcggcagttagccgcgagtggccgttccaccaccacaggtacgtcacgtacctccacctccctgtcatcgtcagcaaagaggagggcccgtcggacagccacagcctcgaggcgatctacggccccaacgtcgtcaggggccttgggaagttggaggcatcacgatggcctctacggggagcaggacgctcaagtcaacatcgagcgtcgccgagacgagcgccgcgatgcccgcatgggagaaggcgcctcctcgtctggagtgccgcgttcctcctcgcgcggcggccagcccctcacgttcacccttgggggaattggttgtagggccttcgtggctagtctccggaacgtccggtggcccctgaagtttcgccccaacctcacggagaaatatgatggcagcatcaatccctccgagttcctccaaatttataccacgatcatcgtggcggcgggaggggatgaccgggtcatggcgaattatttttccatggctcttaagggtcaggcgcgcggctggctcatgacccagccccccgacaccatccactcatgggaggacctgtgccagcagttcatcacgaacttccagggtacatacccccgtccgggggaggaggcggacctacatgctgtgcagcggaaggacgacgagtccctccgctcatacatacaacgcttctaccaggtccgcaacactattccgtgcatcccggcccacgcggtcgtttatgcatttcggaacggcgtgtggcacaaccgcatgctagagaagatcgcctccaaggagcctaagaccaccgccgagctcttcgagctagcggacaaggtggctcggaaggaggaggcgtgggcttggaattcccccagcactggtgcggcggctgcggctgcccccgagactgcccctcgctccaagcggcgggacaggaggggcaagcggaaaccggcccgctctgatgacgagggccacgtccttgcggctgatgggtcttcgcgggccccgcgcaacgaaaaggccaccggtggcaagccgagctccaccgccccctccggtgagggtcgatcggcggacaagtggtgctcagtgcacaatacttatcggcacagtctcgccgactgccgctcggtcatgaacttggccgagcggtttcggaaagccgatgaggagaagcggcagagtcgacgggagggcaaagcccccgcgacccccaccaatgatcggcgagaggagtccaagaagaaggcccccgccgacgatggtgatgacagcgaggatctggaattccagatacctaagggaactgtcgccactctcgacggggggggggggggggcttgccctcacacctcccgtcgtggattcaaggccatgaggcgtgagcttctggccgtcgtcccgactcacgaggctgcacggaaggcgcgttggtcggaggtgaagctcaccttcgatcagagcgaccatccgacggtgcttgctcggggtgggaagttggctctcgtggtctccccgaccatccacaacgtcaagatgaagcgagtcctggtcgacgggggggccagcctgagcatcatttcctcggccgcgttcgacgcactcaaggccccggggatgaagctctagccatcgctgccgatcatcggtgtgactctggggcacacgtggcctctcggccacgttgagctcctagtaaccttcggtgactccaccaacttccgtaccgagcggatcgacttcgacgtggcggacctcaatctgctctacaacgcggtcctgggcaggcctgcgttgctgaagttcatggccgccacccactatgcctatctccagatgaagatgccgggccttagtggccccatcaccgtctttggcgatgtcaaggtcgccctcgcctgcgcggagcagcacgccaacaacctggcggtggccatggagccgcaggccccggtggcctccgcgtcccgcgcttccaagaagcgcctcaccttggctgatgaggtgcccgtcaaggagatcccccttggcgatgatccgtccaagaccgccaaaattggcgggaccctggacgccaaataggaaagcgcgctcgtctccttcctgcgggcaaactccgacgtcttcacatagaagccgtcggacatgcccggggtaaccagggaggtgatcgagcatcgcctcgccgtgcggccggacgcgcaacccatccggcaaaaagtgcgacgtcaagccccggagcggcaagccttcatccgagaggaggtggcgcggctcctggaggctggcttcatccgctaggttatccatccggagtggctggcaaacccggtggttgtcccgaaggccaacggcaagctccggatgtgcatcgactacacagacctcaacaaggcatgccctaaggatcccttccctttaccacacatagatcagatagtcgactccactacggggtgcgaccttttgtgttttctagatgcctactctgggtatcaccagatccgcatggctagggaagatgaggaaaaaactgtcttcattactcccgtgggcactttttgttattcaactatgccttttggtttaaagaatgcaggccctacttttcagcgtatgactcgtattactttaagtaatcagatagggcgcaatatagaggtgtatgttgatgacctggtggtaaagacgcgccaccaggacacgttgttgtaggatttggccgagacttttgacagtcttaggtccacacgcatgaaactgaaccccgacaagtgtgtgttcggtgtgccggcgggcaaactccttagttttctagtctcctcccgaggcatagaagctaatcccgagaaaatacgcgcgatagagaggatgcgcccccccaggaagcttagggatgtgcagtgcgtcactagatgcatggccgccctaagtcgattcatatcgaggctgggagagagggtgctatccctattcaaactcctcaagcgccccgggccgtttgtgtggacggaggaagcagagcaagctctcaatcagctgaaagcttacctcacctcccccccatcctagtagccccagggccagaggaaccgttgctgctctacttggctgcgaccccccacgcggtgagtgccgcccttgtagttgaacgcgatgagggtgacccgcattgcgaacccggctatgggaagggaccaggggcccccttgactggtgatggcctatcggagcttagaactaacaacttggatccgactaagataatgtaccaatccctggatcagtaaatattgatacatacaatataactggttcttcattgcatatgttaaagttttacaatactaagggttttacaataataggtactcacctagctaattaatacacagcggaagtttctatacattctgactaggaaggtataacctttaaggattctctaagttatcggggtcatcgtagtaatagtcataagggtccttctcttgacccaaatctgaaaaaggggttataagagtaaggatgagtattcacaatactcagcaagttatcatggaaatatgttatgcattgacatatattagggttctttacaaaaagcagtactagacaatctggaagagttatagcaagaatttataaaacatatagactttagatttctaaccagggtaccatatgagtcccggtactcaactccatgagtacggctattcgaatagtttcaaaaatattctactgcagcagatgtacgctttacccgcagtccacgacttgctgataatcatcggctttagtcatggcccattattaagtcattaaaaattatggcacctgttccatgaacttatatcctcatatgctctgaacgtattgttaacagcaacaagaggagttctggcgttcccgagatatttaaggggaactgatcgtatgacaccacatcatctcgatcagggtttagaaatataccatatagtttatactcgagtatcacaaaccatttacctgtacatggtaatggttaaagttgcccttcgcggctatagttgcctcctgtgcgaggacttaaaaataagaaccactatacagaggtgccatattgctaattaacataataactaggtttgtccccattctagaaattgcggtcatacccgttcattcgacataagtacctggtaaaacttatatcgatcgagacagtactagccacccggaagtcaaccaaatcttacgtactgtcccaatctaagtataaggtattttaaccagattgtaagcaaagtaagcaatactaaattatatgggtttctatgattaatttatgcatggaaaatagaatattgaatataaggctataaataaataatttataaaatataggcttaaatgatcaaaaggtatatggtaacttgccttgctcgatgtcctgagattgattgatattatctattgagtcagaagaatcctcaagacctagggttagacatatataaaattgaaattcaaaaggaattcaaataaaatccaaaaatatgaaaaatagagaaaataaaataaaatgcaaaaatagcaaaaaggggctcaaaagatagagaatgattttagaagaatattggtccaagtttcactggaattggatctatattttaaaagatatgggcttctaaagtttgaaaatcaaataaatgtgaaatggcactgtgtgcgggtcccacctgtcagtctctctctcttctcttcttctacctccggccgatccccaaaagcggctggcggcgctagggttggcgattacagcggtgatggagggggaaagtggttgcggccgaggaggggagggagctagggttctccggcgacggcgagcgacggcagagggattaatttgatatgtggatggcctagcggctagggcggcggtggcatgtttaggccgtgatggtgatcaagatgatatgagttagacatggctagaggaggggttctagagcatctacgaggtacctagatgaattccggcagcttgccaacctttggcaaggcgtggattaattcggctggcgacgtgttggcgccaatccgggcgcgacgcgcggcggcggcgagggtgaaaacggccgactcgggggtgaatggtttgaattgtgagagggaaaaccactgtctatcttcaatccaaccgtgcagcaagaattggcgcgattcaccccgggtagaagcgaaatcacactcggcggcggctttggacgagcgcgcacggcgtcgagcggcgatttcttgcagcggtcgtcgtcccggctttgtcgtcgtcaagattggtgcggtgatgacggtctgagggcgtcggacgagtgatagcgcgccaaggcggttgggcatgtgcgatcgatccggagaccgacgcgtgacggctcggcccgcggcaaagtcggatgccagagcggcgcgcgcaagggggaggagaaggccaactaaaccacggtttttgagtgggatgttgacccctaggatcaaatctaaactttgcacaagattgggtagtggttaggctgctctagctgggctgggcatttcatcgagcaccttgtgtgcgatgaacagtgaatttcagaatttttgaatatttccctagaaaagatttgaatttaaactatcaatttggataggtttcactagggtttggagtaaagtaaatcctcactaatattagggtaagctaaggaaataatctatagtttgaaatttgagagaatttgctcaaattcactaaggtttggaataaagggaataattagagtaagttagtagggttctaaagaagtaatacttgaaccaaattaagaatcaaatagatttttaaaatacactaatttaatcaaaagccagcatgatgcagtttaaaatttgaggatgttgcatggcccctcgttcccggacggcccggtgcccgaagcccccgacccccgggagggccccgaggcccccgtgggagggtgagaggctctgacggttgcccccgaggcctgtcatcccgaactagtccgggatccccccggggccactaagctcgggcgcctcgggccagttgcccctgacagcaaggaccggccccaccgaaaggtgcagcggcccatctactttgtcagtaaggcactccgagacgcgaaaacccgatacccataggcacagaagatgctttacacagtcttaatggcctcaaggaagttgcgacattacttccaagcgcatcgggtttccgtcgtaacgtcttaccctcttggccaaatcttgcacaaccgagagggcaccggtcgggtcgtgaagtgggccatcgtgcttgctaagttcgacctgcacttcaaaccgcgacacgcgatcaaaagctaggttctggatgacttcgtcgtagaatggacaccggtggatgaccctcttccgtccgatcttccctccctccccggagacggtggagacccgagcgccgacattcgcgccgggcactgggttatgcacttcgacggctccctcaaccttcgtggtgtgggggctggagtcacgctaacttcgccaaccagggatgtcctcaagtacgtcgttcggctcgatttccgagccacgagcaatatggcagagtacgaaggactcctcgcggggttgagggcggcggccggaatgggcatccgccgcctcctagtcctaggtgattcctagttggtcgtgaatcaggactctaaggagtaccagtgcaccgacccgcaaatggatgcatacgtccgtgaagtacgacgtatggaacgccacttcgacggactcgagctccagcacgtgccccgacgcgacgatgcaatcgctgatgagttgtcgcatatcatgtcggcgcgagccccactccctccggggaccttcgaggaaaggctcgtgcagccgtcggcacatttggaccccccgagggaccccggcgccacgacctccgccccgagccccgacagcctgcgggcctcggggcccgaggggatcgaccccaacccccctcgtcacgtcgcctggatgactgacatccgggcatatctcgacaataatactcttcctgaggatcgtgcagaagctgagaagcttgcgcgtatctctaagcggtacgtgctcgtagaagggaccctcaaccgacgggccgccaacgggatactcttgaagtgtatttctcgggaacagggcgtcgagctcattgctgacgctcatgaggatgagtgtggggcacattccgcctcacgcacattagtcggtaaagccttccgacaaggtttttactggccgaccgcgttgcaagacgcccaggaatgggtccgacgattcaaggcgtgccagttccacgctaagcaaacccaccagctggcccaagccttacaggtcatcccgctctcttgggctttcgcagtttgggggctagacatccttggaccgttcaaagcggctcgaggcgggtatcagcacctgtatgtcgccatcgacaagttcaccaagtggcccgaggcttacccggttgtcaaaatcgacaagcattccgcccgcaagttcatcaggggcatcacgtcccggttcggggtgcccaaccatatcattacggataatggcacccagttcaccagtgagctgttcggcgactattgtgacgacatgggcatcaagctatgcttcgcctcgcccgcccaccccaagagcaacggccaagtcgagcgagccaacgcagaaatcttcaagggccccaagactaagacgtacaatgtcctgaagaagcacggggattcgtggcttgaagagttgcccgctgtgctgtgggcaaaccggaccactccaagtcgcgccacaggagaaaccccctttttcctggtgtatggcgccgaggcggtcctaccttcggagctttccctgggttcggctcgtgtcacgctgtacaatgaggccactcaggatgatctccgctgcgatgatcttgactacttggaagagcggaggaggtgcgcggccctgcgggcggcgcactatcaacaaagcctgcggcgctatcatcagcgccacgtccggacccgatcactacaagttggcgacctcgtcctacgccgcgtacagtcgcgcttggggctaagcaagctctcaccaatgtgggaagggccatacaaagtgatcggcgttccccggctaggctctgttcggctaaccacggaggatggcacggagttgcctaacccctagaatatcaaacacctccgccgcttctatccatagcgtcgcaattttttgctttccaggagctcgggccaacccccgcacaacccctcggcttgtgcaggcttggccgggggctaccactgtgaattactttgtacctttttccctttccaagcaataaattttttcccacctaaagtggaggcctttacacgccttttttcttactctttcctctggctcgtcctggttcaaaggacatttcgcgcttactccgaaccctaagtggcgttgggcgacttgaaaactgccgaaagggagcctaatcgcgggccgcgccccgggggctcggaagggcctacgcacggccgtccccgacccccggtcgtcgtagccttggtctggccagtcccactgggcggctccctcggggctgcggtcttgcccctcaccacttagatatggcggaccaagcgcggatttaccttttcacaggaacgagcctgaggggggatggggtgaaaacggcaattcggtcacagggaagttaattgaatatttttgctcttgtttttcttctttccttgccgcaggcattcaatggagaaagcaaaggggtagaaagtgcgaaggggaagctttatttacagacaagatggcacgatggcctaaagataagaagtgttcactacaggcacataacagaaggaaattaaaagcggggatgatcacggagtgcccgagcccccgaggccggcgccgctgaccacgtcgtcccagtccccggacttgcacccgagcccttgcctcagtccccggggggaaatcctcgagtgcgcgccatgggacgaagtcggggtgacgtgcttggtggcttgcgaggaccaattccaccgcagcccgcgccaaggaagccaacgacgatttcacgatctcgccgacctcctcctccagcctctccagatccgccgccagcccgtccagccggatcacgagtgccggctgtgtgggagggagcttcctatcccggcgtacgaagatgcccactcggtgccccgcgcgctccagccaatcgatggcatcggagagttgcccgggtccgatctcgtgggtaaggcggagggccgcgatctccccagcctggtcttgcaccaagcgccctaggtcggcaagggtgctctgagccgcggtaagctggctcaccaactccgcgccgccgggctgtccgcccgccgccaggtccttctcccgggcctccagctcagaagcgccctcgccgccatcgccgcgcgctcggcgcgagcactctccagatgccgagcctcgcgcccggcgacggcctcctcgtgtttcgcgagttgctcgcccagccggcgccgccacctcacggcggttcacctcggcttcgcgctcggcaagcgcggcgtcccgttcccggcacacctcttcccagagccatagctcctccgcgcgacgggccgccaaagctttcgcagcgagggtggtccggtcacgctcggctgcggcctcctcgcgaagacgaagggaggcctccgcctccgtcgccgttctctcgtgggcggccaagatggactcctgctggtctagcaaatgcgctcgctcctccaacgcctgagctcgcccctccagctcctgggctcgctgcgcctgatcccggctgcgcgcgtcctgctcgcgctggttccggtcgaggacctcgatacaccgacgaatcgtggcctcaaactcctgcgcagagcgggcgcgctcatccaaggccttgcgttcggcctcgagtgccgccgtccgagcccgcaacgaggcgtcggcctccgatgcccgccgctcttgggcggcagccgcgacaaggacaccgcgggcgttttcgaccctcttcgccaggtcctcggcatgggcctcgtattgcaagcggatgtcacccaacgcctcatccaggatgcttgacgcgatcagtgccgcctgccgctcttcctccatctcccgcatgacagagtccagcgtctcctcgcatgcctggatctctgccagttgggcttggcgcattttgcaccccacctccaccatgtcatccacggcgcggcgcccctcgtcaacccgcgcgcggtccgccgcgagctatgaccgctcttggagaggtgcgatgcggtggcggaagtaatcgccgaagaccatcgcccccgtgaggccctggcttcgcaggcccctgaggtgatcccgcactgcgtcgtactcctcgcctagttccgaaaccgccagccatgcggcggatcgttcggggcggccggtgagccgaagttgcgggtggttcggcagcgcggtgtagaaccagtccttcttccagtcctcccacttcttgcggagatgactctcgatgtattgccccgccgtgcctggccggggctggaagtagcatccccccaccaccgcaccttgcagcagctgcgggacgaagaaggactggaacagtcgcatcgtcggccgcaccccgacgaacatctcgcacagatgcgcaaagatggccagcgtcatcacggagttgggtgcgagatgcagggcatggatctcgtagaaatccaaaacctcatggaagaacctggagaatggtgggatcaaccccgccatggcgaaggacagaaggtgtacggatcactccgggtaccgcggccgcggctgcgattcccccgccctcacggcggcgccttccggcataatcttgcggggaagactaaggtgcctatctgccgtgatgcgcgatgccggaagcacagcgtcgccagcgtcttgggccatgacgaccggcggtgaaacgacgaggggcttggtgtgtggagtactgtggagtggcgagagtgttagggcttagggagcgtgtgtgcgggtgagcagtcggcgaaaggaaggaggcaaagtccccgcctttgtatccttttatccctgccttgcccgcgctcgcctcctcgtttcacgccctcacggttgcccccacgattcttgcgcctgcaattgcctcatcgtttcccgtgaccactcatcacgtccccactgaatctgcgccccgcatttagtgcgcctgttagcggcgcactcagcgttgggcgtgcgacgttcacgggcgcaatctaggtgggccgccattagtaccgccgcatgcgtggcgggcgagggagtcgaggtgtggtccaaccgactccctcgattttcgtgccttaagcacccccatcatcagcgcggttagtggcggtcaaatcgccgttattgttaatacgccaacctggccgctcggcggcatccgtttagattccccgccgggcccacaaccctagcttgggaagttgtgaggcgccacgtcagaccgacctcaggaggccaacgtacgatgtggtgtcgagggctactgtcggagatatgggcccgggggtatgcgaagtgaggggaatttatcttcccatcctgttgcgtgaccctacagcctggccctacccccgcaccccgcgacttgcaggagcggccgaggggcctcagggtgccacgtcatgcccctcgggccctcgcgccactttgtcccgaggccctcgcccagctgccatctggcggggggagcaagcggggagagggcccagcctgaaccacctttaatgcgcgcagcgccccaactgccccctgccgcattcaatgcagtagggtagacgtgcggcgtgcccgactggtgcgcgtcggtcaggaatgaccgatctgtgaccagcctgtcgccggtcacatccgactggacggacggccgtgcccccacgtcgcatctgcctccgacagagtggaggtaggtatgacctgtcccattggagggtcattcggagttctccccatgaaagggcggccaccacaagtcttcacctattaatgagggaatgatagagatgtcccccgtgtcaggcgagggacggcgctgggccctactcaaggacaagctgtggcttagcttacaggcgaaggcacgggtcgagatccggtcaaggtagggtgggtccccacccgataggagagtaggtagaggcggtgcatgtggtatcccattgaggtataaaaggaggaccttgcccaccgagaaaggggacgactctcagaaaacctgagctctaggagaagggaagcaagagcgctctccggagtttaggaacctttgtaactctcagtctaaatcccatacacaggagtagggtattacgcttcatagcggcccgaacctgtataatctcgttgtgcacacgctaactagcagccttgggggcagagatgcgatttccagaggcgggccttttcccccggccaaactcacgaaagggggatcccacgatctcctgctagagaggatcactcctcgacagtattgaacgtctgttagtttgattacatggggctcgggtctatttatacccgagaattacaaaatatgtccatatcggacacgactcttatctctaacaaactctaagggtgtgtttgaggaggagaggattgaggagattgggaagatacgcaaaacgaggtgagccattagctcgtgattaattgattattaactattttaaatttcaaaaatggattaatgtgattttttaaaagaactttcctatagaaaatttttgcaaaaaacgcaccgtttagtagtttgggaagcgtgcacgcggaaaacgatgtgctttcttcctcaaactcactggaacaaacgctgcctaagatatcataagtctttgcgacagactttttcccaaacatatctctaagtaaattacataaaatatcctaattaatagatacaattgccttctcaggactctatccatgcgtggcaatcatcatgaagcacgttaacctagcccgacaacatatgccgtgccatattgtcagattcggctcaatcagctaaccctgtctgactcgaaccctgccgatcttagtcgtcgccgatgcagacttcagccgatcctcactatgtttccgggacaatctctatctctgttaacagtgaaatttggtaagcccggagtaatcatcggcttagagtcagcatcggcttcgaagtcctgagattagccgatgagagttatcaagtcgtcaattgtcggattcttgctatattcagttaaggaaattaatctactaaaggaagcttatccagaagagaccgagttcgaagagaatgcggcatggcaagttatctattaattaggaatagtttgttagtttccttttatctttaggaaagtgtgtttcgtgtccgatagggactttatgttttccttttatctttacaaaaagtttctttcttgtctgacaagaacttgtatcaacccataggtataaatatgtacatccggggtctatgtaatttatcgctacgatcaatacaattcggcgcatcgccaccctttttacctttttctactttattttatcgtccggcgggacttggcacctgacgcggggctgcatcggtgtttaatctccggctaaggggtaagtccaatgttccgccggcccaggtaatagtatcgtttacgtcggcgtcgttcaaggctgcatcaatacattcgacctcttggattgctctggtttggatgatatatttgcctacctatttatcatatgtgtctgttaatctagtcttagcatattaatttagctctatcggctgcttctcgttttagggtttccgccggtatcggctaaatcgcgttgctagattagattagcctaggtatctaccaccctgaaaatcagtcaacggcttgattgtctagatattatatttattttcatacttagtgctgcatcagttaagtttgatctactaagtcgtgcttagaaccataatctctagcctgcttcttgattgccaataagggtttcatcggggtttcagccggtgagttatctggacgttgcatcggctcataaggattgcatatacatataagttggatttagccgatgacaacaaaggtttcactgtttaatctaatcttgtggatttcatgacatcggacctccagccgatatgtgctttaaccttcggatcgatgcttatttaccatatcattgctagccgattggtttatacgggattatattgctattttattatatcatcatcaaccgattgcctttatatcatcatatacattggacatatagccgattgcttaaaccctatcactatcggctggtatcggcatcggctattatcggctatcggccggaactactccatcggcttgtcagccgatcggctgttttgatctactatttgcatatcttgtcagttgcaggatcaaactgactagcacgcccgcatctcaccaatctttggacctgcactggagctaagcagatctcccaggtcggtgtgttcgattttttcgtcaacaatctcgaactccgtctcgattccttctccacatccgatccttggattaccaaatttggtcgttaacaaagtgatacctctgagatatcatctcgtccgaacggataccttcacgtaacattccccaatcaaaaccccttaaatcaagcttcctcaattaaggaagaggtattactttgtttttctaaaataagagaccatcgcagatccgactctggtctaggccagttgtgtgaccgtctaggacccagagcgaagggagctcatcactaccattccaccacccccagactcaacaagcctcagctagacccagacgcccaattaaatgcaaggtttgactgtgttgatttgttgcttctaagagcatctccaatcgtatctccaaattagactttccaaatacctatatggccaactcttcaactaatttgggtagtcaaactaggtgttcgctcaaacagactctctatttacatctccaaaatcataaagggacccacttgtcagcctccattcccttcttcttcttcttcttcttcttcttcttcttcttcttcttcttcttcttcttcttcttcttcttcttcttcttcttcttcctctttctctttctcttcctccttctcttctcccgcatcggcccatcgatccatcctcgaccgcctcgtggcggcgacggctcccaggtggcggcggcggcgacgtcttcccgcgcgtgccaagtgggaggcagtggcggcggtgacggctccctgcggcggcaacggctcatgcgtgaccgtggcgcggcggcaatgacgatgactgccgtggcagactgtggaccagacatcaacgacgccctcggttcacccctgcttgcagcttgctggtggagtggtgggtggatgggagagagaggaagtatggtgctgggagtggtggtcggacccatctttggccagtggaggaggctggctacatttggctagccgaaggagcaatttagctatctggatggagagtctgttgaagcttgttttttttcatgtattggctaaattttaacttggagagctaaatagagagtcttttggagaggctctaacccgggatactagggcaggtgacagaagtgtccatagtaccgcccctgaggaccgcgtggtggtggttttttttaggggggtggggggtggggcgaatgtgacccgagcactgtccacgggccatgctcaggggtaggtgatacgatgccctgaaatacccatttatctaaaaatgcctatgcctatgactaatgttaaatcatgcacaatgagaattcactaccgtacgcctcaaatatttctatgaaaattggtattgttctctccggtaaaaaagaatatcttgtactttatggtttgataaaacctttaaaattccgaccattataatttctcaaaagcatagtttaaaaccaaaacaaataatatacataggtttgtttataagagtacgatggtaatatcttaaacttaacttttgttttaacatagaattagttgctagaatttcatagaattagttgttagttgaattttaaaagttttgacgaaattttgtgttaaacggtactgtaaatatttttgaccctgggaagtagtagtacagtaaaactggagaattcgagagagtgggtgacagcaactgcctgaaactcgagaaccctacagaaacacgcaaccgctgtggccgccgaatcgacaccaaaccccccaaacatctcgcaacacatcgaattatcgaaccttccaatcctaccccgaccacgagcgaatcctcctcatcgaagtggaggagaaggagatcctcgccggagcatccggtggcttggttcgtgggggatcggcctgcggccggcgaaccctaggccgatgaggccgatccggctgccggagccccccggcgtcggcggcatggagacgcccgagatcttcaccggcgccgccgccgccaccgtcgtcgtccgccgcgccgtcgtcatcggcaacggctcccccggcgccgagaaccagtgcctcggcctcgtccgcgccctcggcctcgccgaccacctgaccctctacgtcagtttcccccctctctctctctctcaccccagtgcagttgttcctgctctactgttgatttttttctctctctccgttttttgaacgaattgctctgtttttttttttggcttgcagcgtgtgacgaggccgcagggagggatcaacgagtggctgcacttcctccccgtctcgctccacaagctaatcgaccaagtgctgaggcagttcttccgcaacacgaggcttgcgccggtggtcgaggggcggaagcactaccgcgtcccgaacggcggatcggttggggttgggctgtcctctgtcctggaagcggacgccaagaagatcgtggctgtggctcgcgatacattcgagaagtaaggcgcgcattgctttgctatctctccgtccacttgtttaaaatgtgtggaactgtggattagggggggttgttttacattatatttattttcagttgtgttaagttgctgaaatgatgttttacattatatttattttgagttcggttaagttgctgaaatgataatgttagttcaggaattctggcaacgggttagagtagatttatttattccgacatctcttagaagttacgggctgctggagttgctatgaaattcacccacttttttcttttatgtaccctttgtttttttggcaaattcgacatcaccaccctttttggagttaacaagtattgtgataaatggtacaatgccatttccatatgcaatgctcgtatctttaatgccgaaaatagttagaaatggaggattaagaggactattgctatcctgatgattttggtgaacatagcaagggatgattaaggtggatattgctgtcctgatggtttggaacaacatctatttgcccagttgaatatgtttgtgtaaataccttgtagagtgcagtcttatgtcacttaaaacattggcaaaccacacatgatctgcagaaatctgagtgttttttctcctagcaatatattttgtttgctggttgctttatgatattttctattatgctcatgaaaaaatagtttctcttgtcttcctaaaaatagtataagctgtgaacatgacagttaactcttctttcagggaagggccaactttaattgtcgcgtgtggctgggataccatatcatattcaagctcaataaggcatctagcttcaggcaatgtgttcgtcattcaggtagtattcaaacctaatgtgttggatccattgctatagtgataggcaacaaaatacctactgattgtgatatagatcttaatttaattctggaaatgttgtcctttcgatttcagatacagcacccgaggtctcgcctagataggtttgatctggtggtgactcctcgccatgattactatgctttaattgctggcggacaagaagaaattccacgcctgttccgtagatggataactccgcaagaaccacctgggaggaatgtggtatgctgctttctcttctttattttgggaagtgaaaaatggttgcactgcgatgtcatacttattctggattttgaaaaagttcaggtgcttactgttggtgcactacaccaagctgattctgctgcactgcgccttgctgctatagcctggcatgatgaactcgcccctttgcctaagccattgctaatcgtcaacattggaggacccacaagtagatctccctatctttctcacgttgcacattccattgtttctgtatttggatacgtagtcctgctttgagtttgcaagaataaatctagccacaattcaaatggttgcactctgatgatttctcatggagaaacctatgcgcacctgagtgcacacacaaaaaataagaaatgatatgtcgatgtgttactgttagatgtggctagtcagttgcatagaagatacacctgttatttctttcagtaacaggagattcatcatttttaggatatctcaattgatttctttactcaatatgatgatctctaaggggatatcatctcttatttatcgtagcaaggaaaagttccttgcaacgccattgtccctggaacattatgaaattgttttaactaatgtgatgcatcataaagataccatagaagctagaatcatcaagagtaaaaggccgaccttttttatgtcctgaagttgcattctttgcccctccccctagatctttgggggtgcagaactagtgatgtgccattactccatgctacctgtggactgtggattgagaaccccacatttgatgttgttgtttagatatctgtattagccttcagctttcctcctaaaacccatgagagcctatgatacaaatcaactcagggtcagaatttcgtatatagtatgtgaggactataaacatatagcgaatcttataatgagcaaagcatttcgatgctatgatcttttatatccttctctgtacacctttcagaagtattatcgactagtcaactgccttgggactcttggatatgcttttgcatgtctaacttacagagagctaacagaatttctgttggcttttaatcctttttatcttaagcttattttgttacagttttgtatgtgtcccattattgattttcatgcccagatccaatattgacttttgttatttgtcaatgattagggaattgtaagtatggtgtcgaccttgccaggcagctcatagcttctacgtataatgttctagacagctgtgggagtgtgagagtttcattttccaggagaacaccgcgaaaggtaggacgattggtattctggtttttctgttataatatcgttaaagaacttggcatttaagtttaattatctgctgacaggtctctgatattatatcgaaagagttcgctggtcatcctaagatctatatttgggatggggaaggtagatgaaatataacactaagttattcatgatgtaatatatttattatgcatgttgttacatttgtaagttgtaacaagttgattttatttttgcagaacctaacccgcacatggggcatcttgcatgggctgatgcttttgttgtaacagctgattctataagtatgttaagtgaggcttgtagcacagggtaagctgatattaaaattcacgtaatttccagcaagctcctaccttttttatgggtttgcatgacttgcttcacatcacacgtgtcacaggaagcctgtttacgtcattgggactgagtattgtaaatggaagttttctgcttttcacaagactctacgggagcgaggagttgtccgtcctttcactggattggaagatgtaagtctatcaatcctgtcaatgataatttgttttgatttatactgcctacttggctacttgcctaatagaatagtgcataacttaagcatgtaccatttgtccgttttctgaaagctaagctgtagtactaatcattcactattttaatatctttataaactctgaaccttatcccttgaaggttttactttaattattttggcaccttgatttttcttaatcctcatgcttcattgattttgatcctagttattaaattcttttcttttctgcatttgctgcatttacttgaataaaatctaatgcattgtgaattcatttgtgcatatagtagaattatgtcaattattgttgttgttgccatcaattatcgttgtgtgggaaatactattgttgtcactctgacaatctttaatgacaaggctcgcataaaaatacagtaaaactatgtcaatgtggcacatgaactttctgctttaccaactgagctatcctgagttcctgaccactgctgacatatttttgtttttgtggaatagttggtgtagatggtaagtggaagtttatggcacatggacagtgtagattaactcacaattcagaaaatattagtagatatgctaatgaaaagatgtaaatcaacaagacaacttatgctcaagtaactacacctgataactagtggtttttcaagtaccctttttttttagattttcttgaggttcacaaggatgtacttgtatatccacaattctgggtggctatatcattcttcttttccttgtagatttcaaatagctggagctaccctcccctaaacgatgctattgaagtagctacacgtgtccgtgaagcaattgcagaacgagggtggtctgtgggatgatagcgacagttaggatgtgttgttctgtccgacagtaaattatgtagtttgattaacacagtcacttaaattcaagttacattgttcagaggaagaataatatagccatggaatggcctgtacaaaagttgagccttttcttttggtggtataccccaattttggagccattgcacagcacccaggagatcatttttggtttgagattctcttccctcttgtacttctaacgctactggagagaagccaacatatgaagtattggaattgaaactttattctgtgtgatacatgagaagcaatctgacattgtgaattgtttccctgtctgtggtttaggtttattcttttcattaattaaaaaaatgcgatgctttctgtaaaatttcatcaaagcttatgccctgatgccttctggctaaaatcataatgttatttatatggtgcactaatattatgggctcctattaatctgtcaattgctgggacggccgcaaaacaagcagcagggcagcttgtttctgtgctggtctgtggacacgtggtgatggtagcagctcgcattgcgtgggcttgttagttgttacaatctctggttgctggttggctttgcatgctgtatgcataacatggcttgtgctgtactcatgaataaacaacatgtttgagaggttgcacatgtattcccttccccatttgagtaatcgccgtttgagctgaggtcaccgtaatagcttacggtgctctgtttttgtaaggtccaatgactgaatgttcgctgccgccatttgtttttgccttcttgagctgcatgcgtgtattgcttgctcgaccaaatcgatgtagctttgcaaaattatcacattttgtattggtgttttctcccaccagtttttgccaaattttgctcatcaaataggcaaacatgtggcttttgcgaaacattcacaatgaaataaggcattgctgtaaaattgttaatctgtagtttgcttaatctgtggaggcaattaatctgtggatatgctaaattttgcttaaaagtgttaggcaattgttgtaggacataggtcggcaacaaatacattcgaccaagcaacccctcgatgtatctgtgtcgaaatgaacgtcagaacaaccagattgggagatttcgtagtactgctcaggcttcgaacttgtgaagaagtgacctgcttaggctgtgtttggatacagggatgaaaaattttggcatgtcacatcggatatacggacacacatttaaagtattaaacgtaaactaataacaaaacaaattacagattccgtctgtaaattacgaaatgaatttattaagcctaattaatctgtcattagcaaatgtttactgtagcatcgcattggcaaatcatggagcaattaggtttaaagattcatctcgcaatttacacgcaatctgtgtaattaatctgcgtaattagttattttttttatatttaatactccatgcatgtgtccaaacattcgatgtgatagggtgaaaaattttaccagttgatctaaacatgcctttagtcatatatgtgtgtttcagggagcactttttgtatggagatggaattaaatcttggtgccacaattacaaacatggggggtggattacttgttaggaatgagaacggaagaatagtttctgatccaatccactataaattcaacaagacacaggatatggcaagtaatttctaaaatccagtggattaagatttttgttataagtgatggattagtacgagtattagaaaatgctatttctaaaagggagtggctatacaacattacacggtttttgggtagaaactttcaaatgtaactactccttccattccacgatgctatttttaggtttggagagtaaatttgaataaaatatgattgatgggataagtagtactcttaagtgataactattgtaggataaatagacatggatggagtatattaatattacatttggagtgtaattacactgtaaatataatgtagttatattgtaacttataacttatgtgtaactcctataaaagaaaaacttgcttggctggctggttagcgcgcggtgtaaaaattttctccttatttttgtatgaatctcaacgttgacctagggtccttatagtgaaagttttttgaaaaaaaaacaatgtcgacaattttatagcaatcccgttcctaaaatccgattaatgagataaaatactactttctccatttcacaatgtaagtcattctagcatttcccacatttatattgatgttaatggatctagatagatatatatgtcagattcattaacatcattatgaatgtgggaaatgctaaaatgacttacattgtgaaacggaggaaatattaagataaatataatcttatattttggcccatttcaccacatcatatggctagaccatacaccatgataactcatacaaatgctattaagtgatttttttcatgagtttaggagcctaagcctaattggcttccttagttgatgctaatttgttgcgtattttacttgttatgttatctgcacatgcacatattatccgataatttgatatgtttctagaccaagttcgctcatgccgtacctaacacctgatttttctaatcaaatatacaatgataataatccgtttaaatccgatcagtttgcattcctactctttatccttgagcgagtgcgatgcgcatgtacatctttatatgattggaaaagaaaaatatatgcaacgtatttcttctttggtacttgaagaggtaccgaacaccatagtacaacagacacccactgcattgcggacattataagccaaaatttaaattttcaacctaaaatttagtgttgattttgaggtttttttttctcgtaatttattttttaatctttgcttttaaatcgctaacaacacgtatataaaaatttcattcacaaattatttttcgttcacaaatatacatgcaaacgatagcaccatctcggataaggatggtgcccagttgactgtcatgtagcgatcgcgacgagtacgtctcggtatggaccccgaaatgcatgtttttatcagtttatggacttttgccagccatttggccatgacagattgcaatatccttcagcccggcccccctcggcgatcggtatgtagacctcacgattttattgctgacactatcatggctaaggtcttctgttgaaatgcctgaatttttagctccaatagtgtagaggaacatggtgtttcttggcaagacggatctgatgcaattatgcaacacagtagggtatctactgtacgtatgtttactctctttataaaaaaaaaaaaaacctagaagtggaagtgacccggccaaaaaaattaacctatgaggaaaaatgacccctctaataaattgttttagaagggatcacatgttaattctttttgaacgaaaggaatatgttgcactgcttggttaccaaatgtgaaaaaaaacacattttatctcgatacagtgatatttacagagcaaaattttctctcggtaaaagagcaaaaacaggttttttggttttatcggtcttggttgggaaagactctgcttgctaagctaccggagcacgacggcggcgaggaagctgatgacggcgacggcgctgacggcggagcagcagaggtcgacgagcacctctcgcctggccttggactccttcctgcccctcttcctcctcacgaactcgtcgtacctcctcttggcttccccttcctggccccgccctcccttccgtggcccggccatggccgcggcgagcagccgcaggcagccctcgccgctgatcgccgcgccgtcggcgtcgtcggcggcgaggctgacctccgttatctggccggcctcctccgagcagctgacggtggcctcgaacttgcacccggcgagcaccacggcgtagcgcaccagcgtgtcgccggtgtaccagtgcctctccaccgccacgggtcgccggctcgacacgttcaccgcccggccggtgctcgggtccagcaagatccagctcagctccagctccgccggcgaccacgacgacgccaccgaggcgggcgccggcgccgggctcttgccctccacggcgtcgacgcggaacggcgaggcgaggaaccaggaggacgacgtggaggtctcgacgacgcgggagacgacggccgcgcccccgtggtagacgtccacggcggagacgagctccccgggcagccgctgatcgtctccgtcgagcggagcggcggcggcggcgtcgtccacgcaggggaaagggaaggcgtcggcgaagaggcggcgcggagagacggcgccggcggcggaaaggacgcaccgctgctccgccgccgccagcgacggccaccgcgacaggcagagcgcgcgccacgtgtccgggtcgtcggcgagcgccctgagcccggacgtggcgcagcccgcggcggccagggacggcccatccagccgccgcagcgcgcacgccagcacgtcccctggcaggtcctccacggtggtggtggtcgccgccattcaaacagctggttgagttctccggatccggtggtctcttgcaacgaatgcgacgtagctagccgagctatggcgagcgggaaacgaatgcgcgatcgcgatggcgagtcggcaacgcggggacgaggccgttttatagggaggcgggcgatagccaagccgatgtcatgtttgtttgtttgttttcaatcggggttgggccgtgccgtgaccgggtccggggtgcgtggcgctcgcgagcgtacgtacacgcgaggcgaggcgactcgcgcggagtacgtacaccgggggcggcatttggctctcgcggttcgcgtggggttggggtggggagtcgcgggaagaacaggcggcggttttgtccgtgtgtcggcggagccccgcgcgccgtgcgggtgcgggcgcggtgcgcggggcgcggcggagggcgagggcgagggcgtgcgtttccctcgtgattttgccggtctccggaacggaacccgtggtttgccacaccggggttgaggcgttacgttacgcgccgtgtgtgcgccgcctgtacatacaccacgacgtacgcaacgcagatctagtcgctgagacgcagaccaagttgattcttcggtatgttgcgcgattcttttttcctttttctcagtgtagtgtaccaaaattggagaagaaaattactccctgtgtagagtacattacatggctgagtctgtgcgttatgtgttaatttgattgggaataatttcagttctgagcttagttagttacgcacagagcgtaaagtagcatttgcagccgcaatttcgtgcgtgatatgacagatagccgacgagcgatcgagaggggatatcccttgccgagccaggtcggccttccatataataacgcagctgtgctcctgctgtttcatttgtcagattagcgaatgatacatatccagctaagaggattagtttgaaagctagcattgcacttggcaggcccgacaaccggataggcctcgcaacaataaactaaagcttttaggttaattttgccgctgcgtaagatcgatggagacttgcttaattatcttcttctcgccgtttgctacatgctgtgcttattaagtactccctccgtcccataatataagggattttaagtttttttagattgtttgaccactcaattttgagtcgttgtttagattgtttgaccactcgtcttattaaaaaatttatgtaaatataaaaaacgaaaagttgtgcttaaagtactttagataataaagtaagtcaaaaaaataaataataattctaaaatttttttgaataagacgagtggtcaaataatacaagcaaaaactcaaaatcctttatattataagacggagagagtactcctttttataatctttatggctcctcaagcctctgccggccaccactcttgaatggcctgccgccgacgcctatgttaccgcaagcctttctgcagatcgatggagcagggtttatcaatgtcgtcactggtcagattagtcaaaccttttgtttttatgcgtaacttttgtgcagatttagaagaacagtgagcatactgatcttgctaattattttctggcagggactagtaaattgttgctgctagcatttgatattcaactgtttaggcctccttagaggatgtttaagggaactaaactgtttcctgtgaaaaatgctgtaatgtcctcactatatctaaaaaatatatatctattctgatgctaactctattatctctagttaataccttttgcattctcttcatatttactactacttattaggaaaaactagaaagatagcccacgcacatgtgcgggcacctcatataatatgagtgaaattttattatcaatatttatgtgtggctgattttttattaaaatatttttactatattctaaactaaaattaagcttatttattgtgctttgaatgctacttattttcttataattacacttgcaacatataaattctaaaataaaattacttaagatcatgcagttttgaatttatgagaaaaaaaatatgttgaaacaatggaggcggttcctatgagaaaatttagggtattttgactcccagaagaatatctcacaaccccaaaagaaatccaataataacatttttttattttaagttttatatattttcgtcctaacagtcctcgtaaaacattttatttttcctatttataatgggttttaaatccagcaacattttagcaattttcaatatatttcatgtcctttttttgagatttccattctatgaatcaccattgaaatgctttgatctttgcaatttgggtcgaaaatataaatgcatttatggcatggtgtaaaggaaaatgttttgaattttctctcgacatattgaagacatggtcatagtatttttagtgaattatcactatactgaagtgtctgataaaaaaatacacttttatatattgttctacatcaggactcatgatttacaatgttagtaagttttaccacaaaattaaaattaaaaataaaggacatggtctttaattcctatatggaagtgacttgatatatttctaagaccacctcaaagtttcattgttaagattcctaggtgcaattcacatgcttatcggtatgatgttcaactgactgcacctttattttcaacttgttgtctataatgctagatgagtacatttatgattaaaaaattatgtcacttaattttttttctctaatttattaatgacttcatagatcatatgtgtaatttggatgttatgatcatctttcttaagaacatttatttatctccaaaaaagattgctttaaaagtatcaaggtcaatttgtataagtacatagcccccgtatgcatgttaagagaaattaattaagttggtagaaagtcgttatatgtataacaggatataagtaatagatggaggtccatttgtgttgtttttgctcatacagataattttaattttaattgacaaggagataaagaaaataaatagaaaatgatggtgcacgccgtacatgggcaaggagagagggaggtttaggatgttttcttctaaataattaatctaaccacctaaaataatgtatcgaataattttaggattttatctgatctataagagcaacgtaacatcttaatagcgtttataggatgtgtaatggacttttaacaccgcatgccgcaaaggagtaggacagatgtaatcaagatataatgacccaaaataatgtgtcaatcaattgagaataatgtttcaatagatttaaatcaaaactgatggttggattatttatttttcaaaatttctaagacttttctctaatttgagaatgccatatagcagcttagaagcatttataagatgtttaataaatttgaatgctacacatgggtggggagagaaggagagaggtttgggtttttctatttaaaaaaactaacaatctaaaacaatgtatccatcaatttaagtagaaattgatagtcggatactttgttctttttaaagattttatagtattttctctaatttaatagtaccacgtagcagtataaaagtatttgtagaatgtttaaagcgatagagggagagctggtagacctagtatgtgaagatctatttgtggggcttattaacatgtaaaaataattttggttttaattaatttctcatgaaaacagaaaagaacgaatagaagaagtaggaacgggagggaagtgcgtacgtttgtttatataaagaagaagtcccggatatggtttttattacaaatggatctaaagatctgaaataatgggtccactaatttaaatgaaaatcaatggtcggatttctcttatttattagagtgtcacttgacgacttgagagcgtttataggatgctacttagcgatttgagagcgtttataggaaatttaatggacttttagtatataatagatggcaaaaaagagcaaatgcatttgaattctctagttagtacctgacagctatttatgtaacccctctgtcctccacgttgaaacttgaaaatagaaataaaatggcgagaaagaacaaatatgtcgtaatgtactctcattaggacaaaaaaaaaaaaaggagaaaaaagtgccaatgtgcagtatgaaaaatgcacaaacgaggaatgcctctcattctctgtgttttctcattgatcatgcataaagcattgaccattctcttcccacacaataattaagtactccatttatcacttaattaaggtcggccatgcatggttgcgtcagctgattattatacaattcgagtgaacgaaaggagctgaggacgattcaggcagaaagaaacataggagcagttgaagctcttggtgacaccacatggcccattcatcaattcatcactcgtggagccacagccacatacattgtttagccctttttcttgtttccattgcctccaactctgtcttggtgtaggatgggtcatttttatactaataatcggttaactctgtttaattataattagtgtgcctacatcacgatgtacggctagctacactctgctctgcaggctcagtttatacatatagtagtagtacagcattagttaatggtgacttcactagtgtcacctaaacttgagctaccctctgaatctctgatcgatctcccattgccggtgcatatgatgaggcatgtgcagataaagtcacgagtatgctcctcccatttctaaattttttaagctaatgcttaactaatcatacgttaattcatcgcgccattttacgcgagaaggggcccctcccaaagaaaaacaaccaagtcggctcctaatcgatctttcgctctcgctggatctcttgttccttctgctcgatcgtctcgtcgtcttcctctggtagtcaaaagaaggatcgatggatcgacgattcgatggaggcaacaaaagttaatcaattgatcgacccatgacacgatggtgacccggccgcacatatgcagtgcagggtctctctccctggagatcgcgccacgaatgttaggcagcgacggagaaccgtggctttggccggagctgcgtacgtatatatgtgctcgtgggagttggggacgatttagtcagccggctgctcgtggccgttttttgtcgggtctctctctctctcgcgcacgcgcggcgggtttgagaaaaaagaaaaaaatgagcccgggggataaggatgactaacacagcattcactgaaagaaaaacgtaagaatcgagtgaaagtaaaacattcggcgatgaacctgggcagccgtgtccgtgttggaacggtgtaaggtcggcgacttgacgttgctggctctctttgtggtagtcgaagccggcaggctgcgaaggtgaggaaactgagctgaggatacggccggtggccaacggctggtgtcatctggagcctggaggaagattgagatcgatcagtggcgaaattgatcatctggctagctaggatatgtaggcctgggcgtagaattcgtcccgaggccgacgccgaccaaggcccagtccagttaggatactaggattcactgggctgcgaccgtgctctctcattctcatggggaataagttcactttgggtccctcaatttgtcgcccagtccgattttcgtccctttaccgcaaaaccgggtatgacccatcccccaacttacgaaaaccgggcaaacgtggtccctcggtggttttgaaggcggttttggctgacgtggctcatacgtggcttgtttgactaggtctctgtcccacgtggcattgacgtggcgcttacatggcaattatctcccggaaaaataataaaaagaatggccccacatgtcagctgcacaaaaaaattaattttaaaatggtggggcatgtcagcctcactctcacttcttccctctcccttctctctcttcttccttctcccttctctctcttcttcggttcttccctctcccttctctctcttcttccctttcccctctctctctccttcccgggcagaggacggcacgggtgggcggcggagcaagcgagctccggcggcggcggcgggcgtggtcggcgccgaccccgaccggagcgccgccggtccgagtgaaggcgagcagagcggcggcgccctggaagacgccatcgacgccgctgaccacccggacgccctgcgtgcgcgccgggacggcatcgctgagcgcctctacaccgcgctcgtcgtcctctgcccggggagagagagagggggggaaagtgaagaagagagagaagggagagggaagaagtgagagtgaggctgccatgtggggcccacatgggccccaccattttaaaattattttttttgtgcagctgacatgtggggccattctttttattctttttccgggagataattgccacgtaagcgccacgtcaatgccacgtgggacggaggcctagtcaaacaagccacgtatgcgccacgtcagccaaaaccgccttcaaaaccgccgagggaccacatttgctcggttttcgtaagttggggaatgggtcatacccgattttgcggtcaagggacgaaaatcggactgggcaaaaaattgagagacccaaagtgaacttattccttctcatgggtggacaggatcagcacaccacaccccaacccaacgtacgtgttgctgcgcgcgtcacgacggcgtgtacatcttcatgccagatgatgcgactcttcgagtatatcgatttcgggcttgtccactgtcaaaacaagatttcggcaatactaaaatggggtggctatcaagctggacaagtggatgggtttagagacaatgaattttatacaggttcaggccttcttaatcaagaagtaataccctacttctatctggggattgatccgccgagtgtattattgatcgtatgatctggagaaaatcgtgcccctcaaggcacccggacccctccttatataggagaagggatccgtattacaaaatacagtccatatccctaacggaataagtacttacagataaaatacaatcataaccgactaggatctcgggtatttccttgacatacaagtttagaatttaacccgaatccctctaaagatattctatctatacatggcaccccacacccagtcggcctatacatgccgtgtaggtatggggtatccataatctccacagtagcccctgagacctttacagtcgacgaaatagcattctctcggagcacaaaatgataatccgagtactccgacttcttctgccctgatctcccgagtaccaaaatcaaagactgtgaaggtctaaaaatagaaaaaatcgggtgcattgactagatgcacctaattaggtgtagcccccgactatgtgattagttaaaaaactaaacatatagtcaagatgcaaacaacatccaaccgagtggtttgacaaccgaatatcaaacagcaaagcatatgcggcgttcaataaaacatccagccgactacttttagctttaatataccaaaaacggagatatgaagaggcctgagtgaaaaacactctaaagatctataaatccacacgtttgataagaatccgagtaaaaactctcaaaaagatccatcaaacgtgatataaatatgataacataacaagtgatgagtctaaataacctaggctatgactcacaccagaatcaaaataagcatataacatgccgagtgaatgactgtattaaaaccagtcatctcaataaaacccaaacagcctttgcagcctaaaaaggcctacaaaattagtataacacttttctgttgggcacctttttatttgcatcgtagtaattccaaagaattatctaactgtgtcaaaaaggattttaacagcattgggctatactgtcgtgagcgagtgttgccgaagcaaaatgcctaagtccctaaggatcacaacttagccacgctgatagaaagaaatgggctgaagtactgttccgggtctaggcccattagtactcccgataccctaataataccaaaaaccaaacgccgcttcgtcttccccgccaagactctcgccactttccccattcctcgctatagtacaaaaccgcaccggcggaactagggttcaccgattcgctcaaatctgccttccaaaactccatagaaatcttccgcgcatccaccgccctaatcccccatccattcccagccatttccaaagcaaatcgcatcatacaattcgcatccatggcggaggagagagaaagctttgagagccaatggacgccctccgacgtcacggaggagagcttgaaggaaatggtagcacatggtgttcttccggtgaaggagatcattggatggcgtccggcgtacggcgaagcatttccgaccccggacacacacgaggtcgtggtgttctcccatttcttttacggtgggttatctcttccaacctcaagattcttccgggggattttgggtttctatgggattagtttgcatcacctaaacccgaattccatagttcatatcgccaacttcatacatgcctgcgaagcttttttgggcgtcaggccacattttgccctatttcgccgcatcttcttcctcaagccccaaccgaacaagagcaaaccatgtgttgtcgggggggccggcttccaactcagggaaccttgagccagaaatatttttcagtgcccttcaaaacctcaaacaagggctgacatgcaaattggttttatgtacaaaaccccgagcctgcactccccgagtactcctgtcttcctccaatttatcaggacacttggaactcacttccaatgggagaggaagccgctcaggcgcttgccctgatggaccgtatgctgaaactaaaagagcaaggtctgcaaggggtacagatcacccgacattttatcaagagcctgctggccccaatcaaagaaagatctcgcacagcttttgaattcaacggcaagcatgaccctaaccgcgaagatcctgaatctcttgaattcaaagttatgaaggagagaatgtataaaatcttctcaaatgcaatcgtagtcagctattcacacttgctgccagtggtgctgtacaacgctttcaatccccctccaccggtatgtatttaaaatctcagcctttctcaaaagcatgcttttaacatctacaaaattgattgaaaacttgtatcatcatgcctaggaattcaccttgatgaaatcagaccctccaactgctcaacgccgatcaccccatcggcaaactggtcaagctggcggaggacctaaaatccggtctgattctcaacccagcaccactcaatcggccaaccaatcagacttccgcaagaggaaattggttatgagcgacgatgaaaatgatgactctgaaaaagctggcagcaagggggtgacttgaaaaccagcaaggcaagctaacccgaagaagaaaacatccagtcgtcccatgccgaaaatcaggaagtcctccaggtacaaatcatttatccatcttccttgtattgctgctcactcactatcgaaatagcactgatagcataactcaaatttgtaggaagccatctgacatagatccttctggaaaagaccctgagccgactaacatggagacgggcccttcaaaagaaaccgggttgaccgccgaagatcgcccgagtgataatcaaccagcaaccgacaacgtagagaccaacgatgagcccccgactggaaatcagtcagccgaagctggagttggtgctaatcaggagcccccgattggaaatcagtcgggcacagggcaaaataatgacatcccggaggtagagacccaggctgatagccctcccaagacgagcgctggcaccaactctggaactaattcccctgctagggtgcaaggtcctgctcgtcctcgaccggaaatcataacaggtaagcaaatcctccaaatctattttgatccgacaaactttcttcaattgtttcaccattattcatgaatgcctaaggcccgatgatcggcgacgaagaagaggtcctccggatacaatcagctgaagattctcgcccacccatattaatcaagtggtgggatgacgaaatgcagcacatggaatcgtaataaataaacaaaaaagaggacgaggaagtatgtctgctgaaaaagacactcggccaagctactcgcctcgtaaatgtaagtcttcttatacacagcttcaatcatcctgtttgccacttttctcaaatacggataaatttgtgtcacagagaatccatctcaggaatgaggcgaagactgcaactcttgaaaaattagttccccatcttggaacccttgaggccaccagaaaacagctgcacgaagctaaagagctcgccaggaagactaagcatgatctgagagaccggatcgccgagctccaagattccaactttgagctgagcagttcgtcaaaaggtaaataccgtctttgtctgacttatttatactgctatccttgtgatatcaaccaacaagaagcaatacagtgcaagctgccaagatatccgagctggaaaagcgcatccaagctctggagaaagacaaggccgaattggcaaaacaaagggactcggctctgaaagatgtcgaaggtactggtaactaacacttcaaaaaccactctcatcttcacacctagtcattgatgtaaacttactcgtgtagaccgcaagatcaaatcccaggccaaattcgacgtcttagttaataaaattaagaagcttgaaggagccagagatgaagtcaccaatgccgctacgccactcgtccaggcaatgtttttcaataacaacgatccgagttcacttgatgctatcgagatcttcgacaagctgagagctgctctagatacatattttaagaacatcaaagaagctgggagtatgggagcaggcctagcgctggcgatgaccatgtacttgtacccgaagattgatattgatgctgttgacggctttgctgacgggacaagtgacgaggccgcccttgaccttattagtgatgcgcaaaaggccactgacaagatagccgctgatgtggttgagagattctaggacaacgaccttaagccaactgggtctggtaattctgatgatgaaagaactgagtctaattgatgttgtattttgatgatattaatgatgatgatggaggcacaatttgtgcaatactgatgaatttatgctatgcttgatgatttaaactcagctcctgatttcttaaaagtttttgtcaaaccttattgagcctagaacccgcaaaagtttttaaaaactttcagtcttcattgactgagccaaaaaatcaaacaaggcaatgataaatcaagtaagcaaattgaattgataaaaatcacactccattattattatagtagcccccgactgataactcaagggacaacttgatgttaacagtcaaagaggaaaatacagaagtaatgcctaagcataaaaacgatgaagatgttcaatattccaagagttgtcgatatgagtaccgtcttcacgcttgagtcggtaagaacctggccgagtgacttcagaaattatgaacggcccttcccacaagggagacaatttgtgccgatcccgtgtagtttgaatttttctcagaaccaagtcgccgactaaaaaagatcgagatcgaacattgcgattgtgataacggcgcatcccttgtaagtaccgagccgactgaattaaggctgcttcacgggcttcttccagtcggttgagatcatctactcggtcttctccgtagcgctcctcgctgaagttacgaaatcgtagagattcaaattctacctcacttggcaacatcgcttccgctccatagactaggaaaaacggcgactggcccgtagcccgactgggagtggtgcgcaaagaccaaagtacggatggcagctattctacccacttgccggcatagggatgcagtcggtcaaaaactcgcgcttttattccttgaagtaccatgccattggcacgttcgacttgtccattactcatggggtgcgctacggaggcataacaaattttgttgccgaagtcctcacagaaatctttaaatactccgcccgtgaattgagtgccgttatcagtaatgatcctgttggataccccaaactggtgcataatgttgatgaagaaatctctagccttgtttgccgtgattgtgatgaccagtttggcttcaatccacttggaaaatttgtcaatagccacaaagagataagtataaccaccgactgcctttttaaacgggccgaccatgtcgaggccccaaaccgcaaacggccaagacaacgggatggtttgcaactcctgagctggtagatgagtttgtcgggcgaaaaattgacaaccctcacatgttcgcacaattttgtcagcgtcggacacggctgtaggccagaaaaaaccttgccggtaatcctttccaacaatggttcgtgcggcagcgtgattgccacagatacctgaatgtatatcctttagcaattgtcttccttcctccaaagaaacacagcgttgcaggattcccgatggacttctcttgtacagctcagtctcatgaatgacataaagtctgcattgcctggagatccgctcggcttcatctttatcttgaggaagttcttgatttgtcaaaaatcttatgaggggctctctccagttggcttcaatcacgcttacgtcttgagtgtccgcggcctcgattgtttctttccttggtacggttggctcgtagagatgttcaacaaacatgtcagaaggggctacttcccgttttgaacaaaaattagccaatatgtcggctgcctcattattgtgtcgaagaacatgggtgagctcaagtccatcgaatttatcttccaacttgcgcacctcctgccggtaagcggtcatgttatcatcaatgtcacgtcctaaaacgaccctaaaatatatcctttaaaattatgcctagaataattaaaatccttgtgaaagcctccaaaaaataaaatgtgcaaagttaaaagtcaaataaggcttggaggatttttgtataatttctaaaagcctaaaatgtgtaaataaattttagtggaattttcagagcacaaataataattattaagaaataaacaaagttgaaaaggtttttataaaaagaaaaaccctaaaatctctctcccctcggatgggccgaatccggcccatctcccttcctctctctctcctatcccccgcggcccattcggcctctccccgcgcgcgcgccgctgacgggcgggcccgcccgccaccctcgctgacgggtggggcccacccgtcatccccgtcctcccgccgctcccgccgccccgcccgcgccaagcgttgccgccgccgccgaatccgccgcatcccgccgcccccgcgtgcaattaagtggggggaattattccccgtgatcccctccccctttacccccatttctccctctctttctcgcattcaaacggacggatttgctcccgcaaatctcgccggcgccattgatggcggccggacctcccgcgccggtttcctcccccgccggccgccctctctccctcccaaccctatttaaaccctccccgcgcctccctcacccgtttccgccacttgccgcaccgtcttcccgccggaatcgagctcgcgccgtcgccctctctctcctccgtcgccgacgacctccggccggccctctccgctcgccgggaccgtctcccgcctcggcgtcgccttcttcggcttctccgcatcgccgccgaccccgtccaccacctcgccgagctcgccgaccgccagagcgccgtcgtccccatccacccgagccgcgccgccgccttcctccgctccggccgcctcctttgtcgtcgccgtcgactcggggtgagccgtggaccgccgcctcttttcccccttcccttcccctctctcggccgccgctccgccgtgcctatggccgccgccggcaaccataggggcgcgggcgccgcctcccgccggctgcaccgtcgtggccgccacgtggggcccagccgtcagccacccgcgccctcgggtgcggctgacgcgtggggcccacggcgccggccggtgtgagcccgggtgtgcccggtccaccgtggaccgtgaggctgccgcgtgggccccactcccgtggacccggtccacgcgccccctcccctcggctgacgcaataaatccattttaaattaaaatttaaatgaagaaattcgcaaatattcacttaaagagcatataaacttcaaatggccataacttggccatttgaactcggaattggaccgttcaagtctctaatttttcctcaagaagtcaagaacccatttttgtgctttgttcctgcttgttatatggagtttattagagtaaaagactttttcctttccattggtcgtgtagacgctgcagctccggaagatccgctatacgtggaggttgaagccgacgtttgggaaagcgagcaaggcaagtcacatcatccttgaacatattgaatcccagtttataaaattattttgatttaaattaatgcattatcgctttatttaaattctcgcgttatcactgttttatttagccatgcctatttacctttgttatgaccttattattattgttattgttattattaccttgttcaccctagaataaacaaaaccccaactagtgggtactctattcatggtaccactagtatgaatttaggtagatgcttcgctgtttaattaggcaacattaggtggttttataactctagactttgggaatattcatatcacttggacattgtggaatggttagattattgtggaattggattcacacctccccctctattcaaaaccatcaaaatggttttaggttgggctcggggtgcatggttttgatagtagcacctcgcccacataaggaccggtcttcgggcctctgttgcaaagcactaccgtgcttccacatgtctagtgggtaaggcttagtttgtggctcagtctggttataaacaaaagtacacggatggagatggacgaagtcgggggtcgatggacatctctaggacaaatgaaggctacacgagctgtggcccggtagtcgagatgtcatggcacagggctggtgtcctgctgctaggggctcagtcctgcctacctgtcccggaggttccggccgtaggtggggctgggtcggtactcttgtctatggctatgatgggttgggaactatgtcacgtcttttgtccgtataccgtggtggtatgtggcacgtggttacacgtgaggaagatgtgtcttgtgggtaaggatgtacacctctgattagagtataacctattcgaatagccgcgccctcggttataggcaagcctagcaatgtacccaagttagtgttttaaattcttaaaaacctgcttaacaactaaaatgtggaatggttggcctgggttggcttgggacaagctgggacccagggtcgggttgccagttcggtctgaatcatcgtagggcttgggttaaggcaggttcgtatgggttcacgaccttatttaataatattgtatagctctaggatcgtgtttttaaaagtaactttgagcaactaagtgtcttttaatgctgtttactgcaaaccctaaccccctataatataactcccttgtacccccttgcatttattctgcacttgtgggtgcgtcttgttgattacggtggttgtactcagtcttgctcaatttttcccaaacccagaagaggagttcctggaagatgaaggctttggtgtctagctcgtgcctgccgtcaagcgcctgtggtcatcgccctagtcttccgttgtttttcgtttgtcttcatgtgtgctgggccttcgccgcccatgtaataaattaactatttacgcttccgcttgttaaactctgtattgtatcaacttttggtgtaccttgcctcctgggacaaggaataatacacgcacgtaaggaacgcccgttgggttatttccagtcgtgacaatcaaggtaggaccactctttcataacttgactaacaatcaactgagaatctccacgaactatcaaacgccgaattcccaaagagattgcaatccttagtccgtgaagaagcgcctcgtattctgccacgttgtgagacgtagaaaaatgtatccacaatacataactcagcctctctccagtcagggagattagaacaactcccgctccagtgcctgaaatcctctttgacccgtcaaaatgcatagtccaatactccatcttctctgcaggcgtgtcttcttggcactcggtccactcggcgacaaagtcggctaaagcttgggacttgatcgaagtttgtggcttgaaggatatatccaaagacatcaactctaaggcccactttgcgatccgcccatttgcttcgcgattatgaagtatatcccctagtgggaacgatgtgaccaccgtgaccgagtgaccttggaagtagtgagataatttcctgacggtaattaaaacgccatatagtagcttttgaacctgagggtatcttgtcttggagtcagccaaaacctcgctaacgaagtagattggtcgttggactttttgaacatggccttcttcttcacgctcagccaccaggactgtgcttacaacctgggaagttgccgacacgtataacaacagcggctcttgcggatgtggtgaagctaaaactggtggagtagtgagaagtgttttgaagtcttcaaaggctttttgtgcttcgggtccgcactggaaattgtcagttttctttaacagcttgaaaaaaggcatcccccgctcgccgagtcgtgagacgaaccggctgagcaccgccatgcaaccagttaacttttgaacatctttctgggagctcggcggtttcatgttgaggatggcgttgattttctccgggttagcttgtatgcctctataggacaccataaatctaagcaacttcccttatggtactccgaagatgcacttttcagggtttaatttcatcctgaaagcacggatgctcgcaaaggtctcttctagatccataatcaaatcatccttctgcttggtcttgatgactacgtcatccacgtaagcttcaactttgcggccgatctgagttgaaaaacatctctggatcatgcgttgataagttgctcctgcgttcttcaatccaaaaggtatggtgatgtagcagtaggccccgaagggcgtgacgaatgaagtcttcaagcagtcggattcctttagtcggatctgatgatatcctgagtagcaatccaaaaaactgagtagcttgcagccggccgttgagtcaactacctgttcaatgcgaggcaacccaaagggatctttaggacaagacttgttgaggtcggtataatcgacgcacatgcgccattgtcccgtcttcttctgaaccaggactgggttggccagccagtcggcatgaaggacttccttgatgaagcttgctgttaacagcttggtcaattcctccttgatcgcatccttcctatcctgtgcgaaacgacggagccgttgcttgattggtttagcgtcttctttaacatgtaaagagtgctcaatcacctctctaggaataccaggcatatcagatggtttccacgcaaaaatatttttattattttgaagaaaggtgatgagcgcgctttcctatttacaatctaactcagcgtctattacagcagtcttagtaggatcagagggatctagggggatcttcttggtcttggcgtcgctttctccgctctttgacatcttggttgcaggcacttctccttcgcttgatgtggacgcagccagtcggatttcttctcgggcgagagtgatctcgcgggtctgggccatctcgcagctttccttgtcgcatgtgacggcttgcttgatgtcactccgcagggatatgactcctcgaggactaggcatcttcatcattatgtaggtattgtgcgggactgccatgaacttggctaacgtcgggcatctgagtatggcatgatatgctgtctcaaaatcagcgacctcaaaacaaatgttctttgtacggaagttctcccgagtgccgaaagtaaccggaagagtgatctggccaagtggtgtagcagatagccccgggatgactccgtgaaagggcgcgttactcggctttaattctgtccgagggatctgcatgtcatccagagtcttggcaaaaaggatgttgagtgcactgccaccatcgatgagggatctgcgaagcttgacgttgcgaaccactgggtctagtaccaggggtaccgccccgggtggaccactcggtcaggatgatccgagcggtcaaacttaatcgttgtctctgaccaccgaagatattggggcgtgtcgggctgaacaacgttgatctcccgttcggtcaacttttgctttctcttggattcataagccaggggtccgccaaagatgtggttgagttccttgcggtggtcttgaaaaccagtcggggcatcatcttcatcatcctttttctttgacgtgctttgatctccgtcagaagttttgcatgtgttcttggcgtattgttctgcaaactgtttgtagacgaagcaatctttggccgcgtgattggaattaggatgatgcagacattgggagttcatgattttgtcaaaagtgttgagcgcgaacgttgtcgggaggatggtgtagtagttgccacaagttccttaggcttacgcttgcgatccttgtgattggtacttccactcccccctgtagttggcatatctttcttcggcttccaagtggtgcccgaatgcttggacgcggtaatggcatcttcggctttggcatactcattggctttttcgaacatctgcttgaccgtcctgggaggcttgcgcccaaacttgtcgactaggtcatcgtggcgaatgcccttggtgaaggcggcgatgatgacgtcgtcggtgatgtcggagatcttgttgcgttgctcggaaaagcgtcggatgtaatctcaaagggattctccagacttctgaatgacgttgtagagatcaaattgtgtaccagggcgttcaaaggtaccctgaaagttggcaatgaagtggtcgcgaagttccgcccatgatccgattgtgccacgaagtaacccgtgaagtcaggaccgggcagaatccgctagggccacaggcaaataattcaccatggctttgctgtctcctcccgctgcgtgaattgcgagaccgtagacggtgagccaagactccgggttagtggtgccatcatacttctcgattccagtcggcttgaagccgcccggccaatccactcgacgcaggtcacttgtgaaggcagcaactccatccatgtcgtcgtcgtcgcgatctggtgaatggtggggagcgtagcctcttgccgcacggcgctggttgattgtagcgcgaagatcgacggggcgcctgcgatgtggggagcgtggtcgttcaactcgacactccctgtgtcatttgggaggcaagtggacagatcgctcgtcgtgacccctgctcctgcgactggatcccgcgccgacgacgctgaggcttggttggtgatggtcttgagatcgaagagggggaattcggctgccagtcggcgtgcggacgctgcaaagttaaccgggactgaggcggcgatcatggtcttggtctggttcaagatgttgacgacgtgattggcttgattgagcgcgtcttccttgaggagggtgtcgaggagggtgatcgctgcaaccgcgttctgttggggggtgcggaaaaccgttgttccctcaacgtcttgttgcccgataagttcccgtgctcgtcgcccggcatccaaggcacgttgtcgccggtcctcagcctcttttgcagcccgttcgcgttcctgttgctcacgctgtagccgttctcgctcttgtgcttggcgctcctcttccagtcggcgtctttcggcttcctgttgtacgcgtaattcttctgcttctcgggctttacactgttcttccgtctcattgtcaaccatgaagatgccgaagtagagaggcgtgtagttgtcttcaaagccttcgtcgaagtcgtcgaggttgcggtagtcgtagcggtagccgaagtcgtcgtactccatgatctccgttggtcgtgagtcgacgcctggggagctgaggtagccgtccagttgttccatcgaaaccgtgccgagaggctggagtatgacgccgacttccctggagctaggctgggccggggctgaagccggattccgcccaggcttgcgaggagaagatgcccttgtggtgaagacagcagccaaatcatcggggagtttcatcaggattggcgaataggccccatcatcttgatcgggtcgtgttgaagtagattggatcttgtccgagtggtttgaagccaactcggtggagatgatcttggggtagacctcggccgagttcgggataccgaacggggcggagatctggcctcttcccgactggttcgaatccgagtcgaggagagaaatcttgccgaagtcgttggtgatgaagtcgaggctgccgaaccgggacgcctgcccaggagggaagacgaagtcgttgatgccggaaacgaaacccatctcactagtcggcgaagaacttgacgctacccctacctggcgtgccaactgtcgaaacaagatttcggcaatactaaaagggggtggctatcaagctggaaaagtggatgggtttagagacatggaattttatacaggttcaggccttcttaatcaagaagtaataccctactcctatccggggattgatccgccgagtgtattattgatcgtatgatctgaagaaaatcgtgcccctcaaggcacccggacccctccttatatgggagatgggatccgtattacaaaatacagtccatatccttaacggaataagtagttacagataaaatacaatcgtaaccgactaggatctcgggtatttccttgacatacaagtttagaatttaacccgaatctctctaaagatattctatctatacatggcaccccacgcccagtcggcctatacatgccgtgtaggtatggggtatccataatctccacacccactttattaaaaaacaattatattttgataatgctatttatttgacattatcaatctttaataaggtaagatgtgaatgagaatgtttagtttgtgttcttacaaaagtttggtaaaacatttaagggtctttttggagtagcttaagattttgagaagaagctagccggtgagaatctggagaagctgggaaactcagcttctagcttctagtttattttctaaattttacattcttagaatttggataaaaagctggattgtttgggggagcttctagcaactgaagattctagaagaagctgtagctgctagaaactccccccaaacataccctaagagtggaaagttccagaattaccaaaatttagtaagtttgtatcgacaatagcatgtttacggctggttcactttgctactattttcaaccatacctttttttttttggcaaagttaccaaaaagtggctatatttaatttattgccaaatttcagtaagtacatatgaaatcttgtcaaaatttgacaaccttgccaaaattttgataaccttaccaaaatttggcaatgccaaccttaccaaaatttggcaatgccaaaacttggtaatgttgaaaatggtagcaaagtgaacaagccattagtttgttgtcttatcaaattttaacatggttaggttccttgtggtcgaatcagtccacccagattttatgtgctagacacgatatgtgtgctctcatttacggctattttttttagtgataggagatgtacctatcgacagcaagacgtctgtggtgatttcgtcaatctcaagatacgccgatccaatctttcgaatatacttacagaggtaaagtgtaactgtgtatttataaggatgagtgttcgtttgtacgtatggagattcgttgtactagacgacgtttcgttccaatccaaatttgtttttcatatttgggcggatgtactgctctcacctcgaaggaaacagttcgctcacccacaaggccacaacgcagcgcacgaatcgcggcgccgcgggcgctggcctgcctgcctgcctcccggccggctaccgcccgatcgaccgaaccgcacacccgaaccgtccggtggggcccacctccctccggccccgtctttttccccgccccgccgcgcgactttcgtctcgttttttttttctcctccttccttctcccctctcctcacgccgccgccggccgtgtcgccggagtcccaacgatccaggggcttctccgatcggcagcgagacgcgccctcaccctcgtcctcgccgccgccgccgccccatgagacgacgtccgctgtgagagctccccttcccttcctctctacccctcactcactcccgcggccccgcaccgtttgttcgttcccttgctccgttgcgcgcctcgcctctggatcccactaggacagtgtcctgatggagagtggagacctagggctcagacatcgtagcgtgttccttctgctacttcgcttttgtgctcgttgctccccaaattttgagctcttcggcttaatttgaggtttcctactttcctctttcagatgtagtagtaactatctagcacgatagctatgcttttattttggaaattacatctcatggggagtggttaagcaggccgaaattcctggattttgtaaactgtattaatttgagtgcttgggcctgaaatgcctgccgtgactatcgtcggcatgatcgcactcatctgggttgctgtcatcagaatataggctagtaatttgtttgaattgcaaatttgcaatgattcactgctagacccaagacccaacagttcttgcaaatgactattgtgctgactctgatttatgctagtacatttcttttcaagctgttcgtgttcatggatatacccatggtgtaagagggaagtattatttttcctcattcatcttgattcttcaaataactgaaaggcattaataacccgtgacggatcaatgcactactggagtagctagggacttacctttctaattagtatgtccatgaaataagtttatcgttgattttgttattgcctattactatttttaagtaaattcaactgaaactagttttataatttgccaatggtgatgtctgatgggaaatacttgatgattttttttataggtttacctctaaaacacaatgatgtcaaggtctgcactgcttatttttctgctttttgtacttatagtcacatcccagcttgaatggaagcaacaacttgttaatgagttggaatctacgtctcacaagcagaaacatatttcaagtagaggagaacttgtcaaggaaaaggtgagctactctctgtaactgatatattttgacagactttgctgcatttgaactattgaacttagatttcttatttgtatcaactgttggaatagagacaagttatttttattttgcaaattcacaaaattgctgcgctggctgagttaaactttcttgcagataatcttatctcaagaaaagatgattcggctattgaatgagcacatccagaatcttcagcaacaattgctgcaatgccgtgtcaataataggacggccaattcttctggatcttctttgacatcatatattggtgagatccaaaggcagcagatgatggatgattgataaggcgagaagccgacgaaccatgtataacaatccagtgggatgtgcgattccagatcgtaccggtagtcatttctcctagaaatgatgtagtgttagtctgtatagaatagtgatatagtcaaagcaaaggacaaggctttgtcgattaaaagaacattggtttaacaggattaaattcattttctttactcataagtagacctttgtatgtctattcagttattttttttagaacacatgtctattcagttataatttacatatgtgtttacaatgtaagcattatgttgctttgttcataaaatatgttttttctattgttttattaaagggtaaactgtattgaaactgcttgttaattgttgaatgggtggtactgttgcaggactggtgagagcctcatcgtttggcttttttcgtaataagccaaaacggcttattagagaataaaaatgaatttgtaggtaaaacttttatatatgtgttctcggtgacttaaaaagctaatgctgaaaaagaaactacgttaaaaatatctcaaaatcaatatcaaaattaagtttgaaaattcaaaatttggctttttctttggctgaataggctatccgatgggagcctgattctctatgtaactctttgggggtgtttgggggggggggggtggtgtggagacgctcatgttactgattactgtaattgtgaatggtcgtgcacatgcagattttaaatctgtgtgatatagtgtaatagtaacacaatttctcgagggcacatcctcacatgttatgaccgacttcacagtttgccaaaatagcactgatgtgttcgttcatatgtgggcacaccagtgatctcttttttggcaaaatgtgaatttaagcgatggtatacgggcatttccacctaatgttgtttcttcattagatgttaaatgcaggggatgcatttgtagacggaggaagactttgtacacaacattatcctcaggaaaatattccatacacggtggaattcagtgctatggtatctgcaggcaccaggaccccaggagggcaaatgtactactccctctgtctcacttattaagacgtagttaaacttaacaaaatcttaaaaattaatttttgactttaaatttttcatatactacaatatttatagcaacagggcctttgctgtttacagtgtgtactactcctgtcagccagatgcctgtttggtattctcacgccaacttcttatattcaagtcactctaaatatgagagtattagtataaccttcaatttattttgtcatatgagtttatagtttagtgttttcgatatttattatcagcttccgatcgatatcgacatgcttccgtctgtatagtccgtttcctgttttccgatattctcaacatcgttttcgttttcagctttacctttttaaaaaaaatggttatacaaatgattgatatgtttcgcgacggttattatcccttgcctccaatggcgcttgtcgctgggcatcgggcaaggcggccttcccgtcaccggcgatgcaaacgccaacgttgtcggccaccttggccagcccagcagcctccacgtgtcagcaaggagcctctcgccccggtcatttggcttattgatggaataatttacaaacgaaaaataatctgtgaataaaacttttacatacgtgttcttagcaatctaaaagcaaagtctaaaaaaaactttgattaaaaaatcctccaaatcaactccaaatttaaatttaaagttgaaaatataaattttgagtgataagcataagagaaaagatgaggatgtatagtcgtgggcttgtggtggtatgctggtagcttagagcatctccaatagcctctccaaatcgaactcttcaacatctgatttagctagtcaaactacatgctcactccaacatactatctattaatcctctccaaaataaaattggacccacatgtcagcctctctcccctcttcttcctctctctccccccttcttctttctttttccttcttttcccctttccttccttcccgtcgaggtgtcgaccacgctattgctgacggcggctgacgcatggcgcgcggtggtgcggcgacgcggggaggctgccggatctagaggccgccgctggctttacggtgacgaggcgacgacggcggacgaggtgggaggcggcaatcgatggcgcccgacgaccttgacatcgacgacggtgccctcgacgaccttgatgatgacgcccctgacgacctcggttgcagatgacagtggcctcggcagtgggacggaggggcggcgccagcggaggttgggcaccagcgcggcggatgccgaaggggcggcgtcggcagagggagggcgccatcgtggcggaggctagaggggcggcaaatctgggggatggggagagaaattgcgcgatgaggaggaaatcgcgatctggggagggggagagtgtaccggatggcttggccagccagttaaccaggctgttggagtgtgtttttaatccaaaattgccaaaatttaacttgaagagtgggataaggaggctgttggagatgcagaacctgtagtccacgtgtagccagcgcggggagaagtttggccagccagttagtcaggttgttggagtgtatttttgatccaaaattgccaaaatttaacttgaagagtgggataaggaggctgcctggacatgcagaacccgtagtccacgtgcctgtcgtattccttcgctgccatgcacgtcgtctatggtgttgcaccgataccccactcacgggcgagtacaacatccaactgtgaagtccaaggcgacatccgcagcagtggcggacggcggtacgacactatttcaaccccattatttcgcttattcatatgcttatccaaatcgcttattagaaaataaaaaaatatttgtgactaaaatttttatattcgtatccttatatactcaaaagcaaatgttgtaaagtaaactacgataaaaaaatcaaattcaaaattaaattctaaaattaaaattttggtttataaatataagtataagccaaacaatgatgccctttgcctgtctggcttggcaacgcctagaggtacaagtgtgagtgagtccccttgctctgcttcttagaggtggggatcacaagtgtacgagcagaatagtgtactacctctattctaaaatgtactaatataggattaggaatatgaacattataggatgtgtgtaatctaattctcggtttctacattttgaaacggagagagtaaagttttctatgggcccattccgacagatctgggcttggttattggcccggttgctcatacggcccagagtatgggggccttcttggggctgaattgaggatgagtaggggcgcgatctgaccaaattgccgccccaaggtgcggcggtgggggtgctcttccgcttccgcagattgcgagtcggctcatcgccccctctactattccccattccccccaattctgaatccgatcgagagtgtgctcaagcttccaccgccctggttgcatccgccgcttcccctactcggtaccctctctctcttgaagtttttcttcgaggaaacgtttctcgctgtgagtccgatcctggtgcatggttcgaatttttttttcttcctgaatttcttttgggccgcagtttcggcggtgttgtgttccgttcatgattttttccatgtgcgctacagatttggttgcgatgttatgtttcgtgtgcttggttaaaccctaggtggaattcaagaaggggtagagccatatcgaaccctaaatcttggcctgttgagtttagtcatcgcgaccattttcgcaggctggcagcctgccagcgttgcagtccttgatcatgcgctcattttttttcttaaaaaaaatgggctgttttgatggatataaacctagattttgcatatcgccggttcattccgtgtgacctccttcacgtttctactcataaactgatgccttacagtttttttttttcaaaccaagtcctaacttgagtctgattttgcacgcaggttgaaagcttcagtaattcatctggtcagcacaaggtaaatgcacgttcttcttttgcagttttcacacggcggccggtgtgccgatggatttctatgctctagcattttgcaattggagcgagatgcttgcttcattctttacaaacatatgcagacaacgtgattaccgtctcaggatcaggaattcaggatctctctctctctctctcttggggggggggggggaggggaggagttgaatgtgttgtttacttctgtaccatatgtttgttgcatctgtctttaccttttgtgtggtctgcaaatagacaactttgtcttggtgtgcttgcaacttttaatccatggcaactgggacaattaatatcgtgagctgatgataaggtaactttgtagttactactccctcagtctccaaatttagctacttcacctcccttatctcaaccgatcacatccatctctcatttaatttttccacctacttccttatctcaaccaatcacatccactcctcatggtctcatttgatttcaactcttactttaatctccgtgaaaaactccataagtgtgtatatcttgggatggagtgagtacttggtgaatcgcatacttatcggcatgatggagtaatggtgccatcatttgtttttacaacacgcttataagtattcccaaaaaaaaacaacacgcttataattcatctttttcccctcaatattaggaagccctttcattggcagttaagtactatcttcgtcccaacatgaagcatttctagatatgatcatggctagaaataccgccattgccctaagattgacagttcaataccgtcacggtgggaggcgggagtgctgctcatagcgactctcttctcgaactctccagaccctaggtgccacttatctattgtcctagggcaacgggactatccactagtttaagcaatactacggtggtgattcatggcgtgcacacgctcattcgaatttcgagaaccaacgtgatttctagcaaatttctgtaagaaaacgtgttctcacaaattcccttttagggcagagacggtgatccaacacaaattccctgatctagtaagccatttgttgtcttttggaaattggctgtgcaatagtgcataggatcagcatgtatgctcgtacttaattacatccctgattccacatgaatagctatgtgaatgccacttgctcctattactgtatcactagctaaaggtccgtgtgttgcaacagatattataagagacaaagcaaaagcaaaaattacaagtttatagtatagttagttgattagctatataatatcatctccaaaggcaaccatactgaaatatgctgttagttcacctctttttatcctcttcgtctattttcccaagccatacggtcggatagtacaagattggacgcttataattcatccgtgggtggcaggtgaatttgaaggttttatatgtaaccccttgcaagttctagaattagcaattccaggaccatttaacgtgttgtggggacattatgcttatggttccacatgtcagtttgtagtgttggaggcagactcggacaccatcgccagtatcatttaaagtactatcatctgtatgattatgagattcagaggttatttgccatattcaacatctacgcgttgcgcgttttctgtgtattgatttatgcttctctatctttttgaagtgatttgtgtacaatctacatcaagctcttcggaaattgctaggtcacttcaatctgatttctggagcgatgcattgtgctaaaaaggcaaaggtggaatcacaatcagctgagagtttagatagactcagcagcctacctccagagctaaaagtcgccatcctctcgaagttgaatgtcgtagatgctattagagccagcatcctatcaagtgcttggaggaatgtggcaacttattctgttcgatacgtatcgcatctcaggcacattacggtccaaatttactacactggtagatctgtcactgttgctccacaatggacctctagtttcgttttcaatttgatgtttgaggagttaccttaatgcatatgataggtggatgcacatgctgtcaaggaaaaaaccaagttccatcacaatcgagttttcctgtgggaattattataagattccatcgtgcctcttctctatcagtgatttggaatatctacggatagaaagatgcatcatcagcttgcctcggcagtttgaaggttttaagcagctaactgttctgaatctgaaatatttctcctcaacagacagtgacataaataatctgatctcctcatgccctcggctgaatacattgcgtttgaaatattttaagggtatcaatcgtctccgaattcaagctcaggcagtacaggttttagaggttaaagggtcctttgaagactttcatctgcatgcacctaacctgtccaatgtgtatgttacactcaacaaaacaaaagttgcagacaggagtaaaaactatatgatgcaagcttttgtgagcctaactggaatagaagcacttgttatgaaaagatgtatggttgcgttgcctcagacgtttgaaggtttcaagcggctatctgtcttgaatctgaaatatatatactcaacagacgctgacatagcaaatctgatctcctcatgcccatggctgaaaacactgcatttgaaatattttgagggtatcagttgtctccgtattcaagctccggcactgcagcatttagaggttcaagggaatttcgaagacttgcatctgcatgcacctaatctgttgtatcttacactcgacaaaacagaaacagaacaatgtgatgctgttgcgggtgacaagaaaaattatcccaaggaagcttttgtcagcctaactagtatagaactttctataaatggcccttccttgacggtaacatattattaattttgtgctattaaactatcatgctgattaaattttattgataattcttattggtttttattctgatggtagtatctatcggaagggtgcttgttgaccaaacccccaggcgtgcttgatcgtctgaggaaggttagtattggggagtgcttttggcactggacaggtcttgggtgcttgttcaatttttcggaatgcccctatgttgagagaactcgagatacaggtatgcctccctccactctccactctcctgcagttaacttgcatttctttccatccataattactaggctgcattgcctcttgtgttctttgtggtttttgttaatgtctttactagttttttgcttctaacttctacagagcttctctcgaccggacgattcttggagtcagccaatatgggatcatgatcagacggagatcaaagagcctaccttgcatcacctcctgacggcgacgatcaccggtttcgtggggctggaatacgaggttgatctcgttaggctgctcctgagatggtcacctgcattggaggaactgaaggtggtcagggacgacgaggatgtcctgaacgatgcgtgcatgtgcgagtctcttaccaagttactggctctcccgagggcttctaccaaagccaagatcattgccatctgatctgatcctttatacagctatatacctcatgttattggcgtattgatgttgctcgtggcagaagtagtgtttgctagtgagaatgtgttgtcctgggatgttgggagttatgcttgcgttaaatctgaatctttttgttgtctttgaattcagtctgtttttctcattcaaacgagactatatgccctggttcagaatgagtgaatgttcctggttggagaattatcatgtctcttgtgttctgttaattaaacaaataggaaattggcgttatgggctcgcttactgggcctcgttttttgggcgcggatcgctcatacggcccaacattgtgggctgcaattgggacgagttgaggattagtagaccagacgactcccccgaggtggtggcggctggcggtgcgcttcggcttccgccgcttgcgagttggtggctcgccccctctcgctctcaactctctctctcccccgaaattccgaatccgatcgagacgaatcgagagagagagaggcgccgcggatccgggtaagcatgctcgagcttccaccgcgcatggctggtcgcatccgccgcttctcctagtagatttctttttctctctcttgatgtggatgctggtgcatttttcctctgccatttcttttgattttttttttttttggggggggggggggagttttggcggtgaggcggaggtgctccactcatgattatctccatgtgtgctccagatttggtcgtctttgccttctcctacgttgcgatcatgcgatgcttcgtgtgctttgattaaaccctaggtagaattcagagaaggggtaaaaccctaaccaattctatttcctcgcctatctgcgttgtaaacttcttctttctttctttctttctttctttttttttttgcggggaaagcgttgtagaattgtggtcgtggtccatgtgctcaacctttttttttttttgaaaaaaatagggtggttttgttggatagaaccctagcttttgcatatccgctgatccattccgtgtgacctccttgccgtttctgctcggtccctgataagttgatgcatattttagtggttttttttaacaaccaagtcttaagttgagtctgattttgctcgcaggtgaatgcttcagtgattaatctggccggcacaaggtaaataaatgctcgttattcttttccagttttcagattgggggtgtgccgatgggatttcttatgtatgagcattttgtgattggaggaagatatgcctggtgtttgctgggagttgggaaactaggtgtaacaactaacaaggttgatgagtgatgcttgggggcagtgtatggagttatgatattgtgtacgtttttcgtttaataggattataggaacaataatttgaatgtgctgtttagtttgtaccatatgtggtagctatcttgaccttttggttttcaaatattttctgatgtatttatcagcatgaggtactgaataatggtgccatcatttgtttttacagctcacatataatccatccctttgtttccccttgatgataggaagcccattcattggcaatttactataattttctgaactcaatcagtcggttaatctaaccagaaacagagaccaaactctattgtagcatatccagtagaccattttttaccattatcctaaattacgctgagttagggcaataatttttttaaaactttagttgaactcgtggaagctcaagggttaatctcaaactaatttaggtcaccaccagaaagacatatatacataacccatgcatggagggtacctcaaagtattcttgagttttgggagtggtaagtttaactgatttgattggtattactaagagggtgttcatgcaagcgttcattacctttgattacttttaaagatccaatagacataaaaaaaataaacctttaaagtttgagcaatgtcatggtaaacgttcattgtagtgaaattaatgcatagtgatgaagttcaatttaacgtggcaagaaaagaatgattataattgtaatattttgtacattttaaaaagttgccaatcattaagtgatgctatcgttttgcattatttctttacttatcactgaattgttgtgcatagttctgaaggaaaatatacttgaccctgcagatgtcattgcacattgggcggctcagttcacatgtgcgtcaaagatatcttgaacatcttttccagaggtttggaaattgcacagtgaggctgaaagatggatatggatttgcggtctttgattctaatgatgatgcagctcgagccatgcgggcactgcaggggaaatttgtttgtggggagcgcattactgttaattggtcaaaacagcagcccagattttctaaggatttcagaagttcaagaaacattgagtcatctcaccagagggcacccagagtcagagatggtaatattaggttcagggattctttagctcagaagaatcaccctgcaagtcatgatcagggtcacagtcctgatgttgcaccagaacagaaatcatctgatggtgcattggaaaagaaatctgatgaaaagaaatctgatggtgatgttgaggatttgaaggatgtgagggaaactgttggtcaagatccagtggagatgaagaggaatgaagatgttacaagtgatgcaaatgtaattgaacatgatagatgggaggaaactggaaaagggaatcctggtagagatgatgatgattttgaccgttatgaaccttatcatggctatgccaggcaagaagaaagagcagaggttgtcaaagcaagttctcaggagacttatcatcatagattttcttcacagaagtcgaaagagtatcctgctggccatactgctcatgattgcccccagaaaacagatggaggattcgaagcatggagagatgcattgagtaggcaagaaaggctgagaagatttgggtctccctcaaggaggcaaccagatactcgtgattgctctaagaaaacagatgacagattcgaagcatggagagatgcattgagtaggcaagaaaaaggtatggtgaggctgaaaagatttgggtctccctcgaggaagcggacagaagaatttcgtgttgataaggtggtagaaacacatcgtatggtacaagatggcaggaaacaattttctgataggactagccacgctcacagattgagtaatgtttctagagaggacaaaaggcatacccgttgcagtgaaagtataccacagacccccaaggagtcacgcaagagaagcagatctaaaagatcccgtgggtcatccctctcttctgacaggagtacctcacattcaacatctaaatgttctcgttcaagagcacattccccatctcattctgcacattctagttcaaaatcatttcagccaactcagcctgaaggtttaagatcaatggcagtatcaaatgtcagtccattgctggtgtctggttcaccacaacacaacttaccatccacagcggaaaacaagaactcagattttctggtgaattctcctttggagggcaatttagattccaaaacaacaactggactcaagcatacacgtggttaccagcaagatatcaaagattcaagattgagtggagagtctccagttattccactcaggttgaaaatccaaaggaatggtgaattgcctgtatctggtaaagatgcttatctggatggttacacagagaccaacttgaataataacttggtttatgatgacaatgttgctgatggtgtgcaagttcagaagaccaattctgaggacgcttcatcagtgaagtcaagcaaggatattctggtgaaaagtgagaggagcaactctttgaagctaacaacaaatgaagtggtctctgctcttaagcacaatggaatggaagcacgtggtacagatttattgaaccaacctgtagagaagtactttggtgctgcacgcctatggccatgggaagtcatttattatcggaagcttaaaaagggtccaatttctacagagaactacgctaagcgacttgagcagaacaaagaatatagtattgtagatcggtatgtcagaagcagcagtggttggtgggagtgccactagaatgccagactggtggtatagatagatgcagttgaggctttgcgtgtatgctgctgcaggtacattttgaggatgacaaggtttgccttctaatcagtccattcctagagctccatgagtgtaagcagacccttaactatgagaattattaagtattaggttctttcattagtataattttgttgagtaagggtttgcacaattgcacctaagtagcttattctgccaccaatattatgctgttgcatggtcagtatgttttaagttgtaatgtttcaacgactcgccccagtgaggtactttggatggccaacaggtaagcaaagatgcttattttatacatgattttttggggaaaagaaacaagcctcttgtttagcagttatatagaggaaaggttctctctgtagtttatgatttccttagtactccctccctctggtttcataattcttgacattttggacaatgatatggtctccaaaatatatctttaactatgttttctctattataatatatacaataaataagtatatttttacttttattatagtacttataagacaaatctatatatgttgttttagtgtctttaaacttaatattttagaagttattgatagtcaaagttataaaagtttgatcttaaccttatcctaaacaccaagacttatgaaaccggagggagtatgactacaattatttttgtaatcaacaacttccataccccgctaatcgagctgaaatattacagtgatgccacttcgtgatagatttcatatgcaagatgtgctcccccggcttacaagcttttggataggaccaagaaattcttcgcatgtttgagtcgtcactgttatttttgtgtagctgaattggagtaggtgattgaagctttgctaactggattacctgttacttttatgtagctaccctatgaggattatgccattctggctggacacatgaactccataatatcagtacctttatttgagtcagtttttggtcttttaatgtgacttgtcgctgatgtctcatcgtcgtatcctgatatttatattgctctgatcttcttggggattccatctagacttttgcatgcgtctggctttatatttctccaaacggtgtgatagccagttgtccatgacgacagaacataaatttgggttcttgcatatcaaacgctttatttttccccgatctgcatcgaatgccaaatcaccatcatgttgggtagatgttgaatcggatgttttccttcttttcgtctcctttcacgaggagattggtatgtggtgctaattgcaattctcccagttatttagctcctcctgcaagctgctgcagcggttttggccttgctgcctttctggcgtcaaaagaaaaacttgtttttctcttgccttgtttaagttgggttgttagcttccaaccagggattctattgtcgttgtcactcttggggttttgcatgcgcatgtaactcgtttccaatccattggttgctatgctttgcgctacggacagtcagtcatgctgacaattggcagctatggattacgacgttaatcacccgtatttatgacaggtggtgaaaagacagtggagctaccggtcgtgtaaaggattagaaaacgaatgaaacaatggcatatgggggcttagcgtagcagagctgctgatcgcaacgcatcgtcactgcaggagctaactgctgatggctggctgtcacagtgtcgattacactctgtttcaaaataaatcaatctggaatgtgaaaaatctggacagagaatatgttcaaatttattatagatgtatcacattctagtcaaggttggcttgttttgggatggccctctgttaaaaaaattaacttagaataaaatataatattatctagtacaataaatctggatgagtatctctaaatttttgtttagattagttatattagataatgttatgtcctagaaaatattttataggttttctttggatagagggagtaagtagaaatggtatcattggccctgggctggtttccagattttcctgaacaatatttgaatttatgttgatttcatactctgctatagcaatattcatctaaatgattaggtcgtaatttggatgatgtgcatgttagtaataacttacaatattgttgtacgaagtagtaacagagagctgaggcacatgaatctatcgtccgtggcaaagttgaccaaggcatcatcgtcattaaggtcatgtacagcgtcatcacgacgctcgcattcagatggacgcgtacatgatgatactactacttgtagtgacggaggttgtaattagttcggtattgattgtgcatttgcactagctgggtcctctcctcctcatgccataaaactctctcttctcatgcagacatgcacactactactactcttgctacgaccatgaccacgactattcaactgtttctcatttacaaccagcaaggaatttcctcgcagttcatcactgctaggggaacagtttgaaaacagatgcatttcatggaatttttgcaggaatttcggggtcaaaaactgttcaactctctctcgcgcgtgatattcagacaagatttgttcctgttgggacgacgaaacagatttgacatgcgttgcatatatacgatgatgatgaactactgcatgctgggatcgatcgaatcgatgatactacgtgtgataatatatagattgatgcttataaatcatggttatactgcataatctgcagaggatcgagctgattaatcatgatactactgctgctaattgagaagaaactaatggggcctagaactaattaactgtgatcatcatcaaggtgagatttcttcttctcgttgttcttcttgatcctgaattcctgatgcctctgcgcgatcaaagaagcgtgtagatgcttctcctcgatctcttgctgccatcatggtcatggccatgttcatcccctccggtggcggcggccgtcggcgttgatgccgccgccgccgccggcgtggaggaagtcgaggatgacggggctccggcacttggggcagcgcgggtcggcctcggcgagcatgacgtagaggaagcagcgcgggcacgcggcgagcaccatcgacgtcgcctccgggctgtccgaccactgcagctgcccgccgccgccgccgtgctgctgccgcagctcgctctccgacgacaggcacgagctcggcgacgactcgtcgtccgccgccggcgacaccgcgcgcgccaccgccggcagcgacaggttcagcttcaggtccagccccctcgtcatccccctcccgccgccgccgccgccgctcatcacagtcaccgtcacgtacttgcctcgcctgcaaattaatccatcgatccatgagcataaacaaggctaattactgcttaatactactactactaagagtgattaattaggtctagagagagagtaagggagatcttatgtagtacttgatagtcttttgtgatgaactgatgattctctgaagattttttcagctagctgcagaatgacagagatgagaggatgtggttcttgtggggaaagagggattgggcaagtagagtatttataggggggaaatgagcatagagagagagggtctcatttggttctctttaaatgattgtgcactatggatgagtactttgatttgactattatactcatacaaagcaaaatagctaataccttatgattaatttagttttaattattataaacttaaaaaagaaatttattttatattttaaagtaacttctatacataaaattttcacacaaaacatactgattagcactatgaaaagcgtgctagcaaaaatcgaggtaaattttgtatcttaatcagagaagaacccaccaattaagacacatatttttcctcgatttccgttagcattcttttgaaactggtaaacggtttgtttcttgcaaaaataattatatgtagaaattgttttgaaatatcaaataaattccttttccaagtttataataattaagagtcaattaatcatgtactaatcactttctcgttttgcagacctaacttcatcttcatctttattgagtagagtagtactgcagctgtttattgctcacgttcatgtttctgtctattgagtagagtagtgaatggcaaaggaaggaagaggaatagaggatgttgaacctgaacaggcttacaggcctggtgaagggaacttcagacgagtgccagttggaaggcctgtcacccgtgtgttgtgtgactgtgtgtgcctgtggtggaccatgtgtgtgtatggtcacactcatcatggtcatacgatgcatcctcaccacagaaattctttcagtctctggccacgaaccaaatagccccttaacacgattgtagcactgtttcgtgctattggtaataagatgtgattatgaatcaaacaccttctaatactatcggtagcataattttaccatataattatctaattgtaggacataggttatactatgttggatgatatatgttctctttttgtttattgattgatagctccagctaggtttggaaattgggcagcttgctagctagctgaattagactgacgacctccgaccttgaatgaggcccatcaatggaatttatgggttacagtagctccagggcaccaaagttaatggatttcaatggctgatggatcgtctcagctctcctttacgttagcttctccaaattagctagctcatcccttcaattcatgctatgtctatcagatcagccactccagctagctcttaacgccaagcaacttcttttttttgaggggatgccaagcaacttccagacctccagaaatggtgcagacacaaacctctgcagcttaacagttactccctccctccttttctaattagccttctcaatctatatcaattatataaaattcatttcggaattttagcaacattatatatatatatatatatatatatatatatatatatatatatatatatatatatatatatatatatatatatatatatatatatatatatatatataattaagcttttccactaaaatataaattaaagggtaatacatttattttcatgtgaggggcaaaattgtctttttgatgtgatttgtctcgaaaataataaaataatagctacagtgtttcctagtaaactacgagtaatttttttacagtgctctatagttgtttcaattttttgaggtgtccaacaataaataccacaaactttaagtgttaattatgtaacaaatttttccataccaaaatattttatgagtatattgcgtttagggccaccttttattatcaaagtttcattttggaccaccctttaacacattttttcactttgggctaggttactttacctttctttcactttggaccaccccataaactttttaggaatatataaatgacttttccaattttaaacacatcagcaacccgtaacccagtaatcttttccaacttacacatgcaattctttacaatattatagagtagatgtaactaaagaaaataattttgggtggtccaaagtgcaccaaaggtaatcttacctagtccaaagtaaaaatatgagctagaagatagcgtaaagtgaaactttggtaacaaaagatggaccaaagtgcaattaactcatattttattaacgaccaaaaaataatttatgagtaaaatttttatatgtgtcgtttgcgacttaaaattcaaagtttttacaggtgttgtttctttgtaagccaaacgatgagcctccataattgcacatcgatgcagccttgttgcgatatacatgaacaccctcttaatttattgcagacagccctcaaccataactacgtacacggatcatcacggtcgaaaatatggcctgctcgtctgcgaagatctatagtccttgcagtgaaaaatcggttttagtattgtttgtccagcgcgataatcaagcaagcctagctaaatgctgattgacaaatcctgagaacaaatctcctagtaatgtataaattatgtagcctgttgctcttctcgtaactcaaatctctagtaatgtataaaaacaaatctgtaacctgttgctcttctctcttctaatttatcttcttaggccatcagcaatgggtgccttcgacccgtcccctcgcaaacggccatcaacttttgcatctgagccgtgccccaggcgagacgcgcgttttctcccagagggacacgcccctcggcgacttttggcagagcaaccaggcaaggagccatgttgtgcgcgtcgttgcttgtggacaccgctccccacacccatattccctttccacccttgccagagctggaggcggcgctggcgaagtggacggcgacgagcagaggcggggaagagagggggaaagagcggatctagcgccggcgaggtggatggcgatgagtgacgggagggagaaagtgggagagagagagagaggcgagcggcggggcggcgacggcacggccgtgccccgcttgctgctggccgtcggccccctcacgccgccgtccggggtcgccgccgccgcatccggggtcactgccgccgcctccggggtcgccgccaccaccttccatgggaaagagcggcgggagagagaaagggagagagaggcggcgacgacgggcgacggcgagatccgcccacgacgcgccggatctaccgcctccgaggtcgccgccgccacctccgggtagccgccgcatctcccgggggacgaacccctcggcgacctcatccatctccgtcttggcctcctccgcgcggcgccgagagagaggcaagtggcggtggtggcggctggggagggcgaggagggaggtggcgccggcgctcgcgggagagagagggaggggggaggacggcgatgtcgccgagcggagggagtgatgccggcgaagaaaaaagaagaggagaggaaagagcggaagaaaaagtggagagagagaggggggagaagagaggggtagtataggaaaacatctaatgtgggtttttttgttaggacacccattgtgggcttgagtaccttcatctagttgcttcagattttgaggaactcatctaagggtgtctattattgcgagctaagttcctctacgagtgtcctcagttagtgaggacactctaggagtggctcacattgtggatgcccttaaattatgtttacagctgacttatagttgtacccgctttgagaagtcaaacctcctagtaatgcataagagctagccaactaccggcttcaattcatctataaccaatctaatagctcattgcctataagtatatactacatcactaatatatggtcctacatcttatacacacaaaacgtattaaagtttgtactgcagctggctataaatttatagcccgtttttcttttcttcttcatatgtgcttacagctgacttatagcctgctattgtactcgctctaaatgcaagacatcgaatccatacaggtcatacacacgcatgcacacgcgcgcacggttgacttttttctaggttccgtgcagtgtgtttgcgtcgcgtcgtccatgcacatgtggcctaattacttcggcatttaagagacacgcacacaagaacgaaagttactgcagccgtagaccattagattagatttgatttgattagattaatattgcgatgaagtccccaaacaaacgagaaataaattgattgccaacttgaagcacagaattaatgaaagaaggttcctgtacagagcctcggtttggtgaatgaaacatgtgttgatcattcgatcggctgatgctcatatgagtacgtacggcacttgtcatatttcttctcattaatttatcaatgagacgcacgtatacggtatacctcatacacacaacaatttctaataacatgttgccaactaagtaaatttgctgagcatataaaaattgtaaaagaagggaaaagagaaatattgtaatttcagttagcaacagctcaacaacgttcactactttaaaaaaaagacatatacatagataccggaacagctaaaaccaacacctataatgttttcttcacctccacatactgaaaaaaaaaaaaaaatcgacacctataaatgattataggtgttatacttctatagaaattccgacaacaaaactataggtgcattttttccctggacacctatattttagctcgctctctctctcctcgcagcgccctcctctccatccaatccggtgggaggggaggcggcagcagtggcgacaccctccctgacattaggccattgttagtgtttttagtgttcttagtgtttttggatattcttagattggtcgtatttttttaattcgtgaaacctcaaatatgtcggttcctaaatcggcacctatttcccctccacatcagtgacaccttctatgtgccggtcgggaaaccagcatcaattaaggtttttgcagtagtcgttgtaggcaaaaaaaaaaaaaaacacgagagcaccagataacatcaggtattagtaaagattgatgtcaaaacatataattagaatgtattagtaaagatttagctcaaaacaaaaccctttgtagcattccgcttccatggattgaatacgtaagagcccacgccggactttacttttgaatatgtcctaagttttcttttacttaagaatattccctaagttatgcgtataagagccatcaatatacgtacgttattaaaaggatttagactataatcagagatgtacacaattctatcgtatgcatatactatatactaagttaaaacaattttcaaagtcaaaattaattaatgaacgtcgttacacgcctcatttaagatttagaccgccgtacatacatgtattctcctcatctaggtagactgaggagttgtggactactcttccatgccctactgatcaccgtgcaacgtgcatggccaaggaaatcgtaacagttcccatgacaaagagacgtgcctgcctgactgactgattcctgacctacgtacgtcggcgtcaagctgacgttctgatatgattgctctcatgtagtactaaatccgtcatattttaagtgtaaccacgagttttcgtacctaacttttaatcgtccattttatttattttttttataattagtatttttattgtttttaatttttttaagataagatggaagatcaaaattagataaaaaaatcatgattgcatttaaaataggacggagggagtattacttactccgtcccaaaaatataagaggttttctgaacatatgtttttgtccaaattagtagtattagaatatattacgtccatccaaaattacttatattttagtatattttagctgatggagtacttattaattggggagcattatcagacttaaaaaaaaaagaaagaaaggacagaacgtgcagacagacagtgcattaatcctctgctagagcccaagtccatactccattcaatgcaactgctccaaacacaagtacagcgagtaaattcgatcacattggaagaaacgatccaaacatgtccactggattcatggcctggtaattaaaccgcgtgacttaataattatggcctggcggtaggacggcacgtcttgtttcataccaatggatagatgctctagaagtccaaattagtttatgcttccagaggtgtaataattagctttggttaatgtcaacttcatgatcaggttttacatactccctcagtcccataagggattttaaatttttgcttataacgttggaccatcaaggttgtcagtattctaattcgtatcctagtatcttacgatactatgatcctactaagccgaaatgataccgatcccatctagtatcttatttttcatagtatctcgatcctactattcattactacacgatcctacgaaatcttaggtggtatcccgattctacgatccctacaatactacaaaatattattttaaataacatggtttgaaaataatgtaactaaatatgctcaaatttatataaaaattagttaaatatatcaaaaccaacgtggtttctcttcataaatgcctctatttgcatgatatatatcattactacatttttttatacagaatggctatatataattaatataaatattaattaaacttaaaaaaagaaaatctcatagtatcccgatactacgatacgatcctacaatacaatattactttgagcaaaacgatactacctagtatcccgatcctgacaaccttgttgaccacttgtcttattcaatttttttttgaaattattatttattttatttgtgacttactttattatctacattactttatgcacaactttttgttttttatatttgcaaaaaaaatttgaataagacgagtggttaaacgttacaagcaaaaacttaaaatcccttatattgtgggacggagggagtattttgtcacgcgacgtatgtacgtaataaaaaaaaactccacccattttatattataaattgtttaattttttaaatcaaactatgttaagtttgatcaaatttattgaaaaatttagtaatatctaaaatatcaaattagtttctttaaatatcgaatatattttgataatatatttttattgaaaatatagttaaactttgtcaaacttaaatactacctccatccaaaatatagtaacttttggctatgaatttggacacacagttatccagattcagagctaaaaatgctcatattttagaacggacagagtatgtattagtaacattagtgcgtgtttatacaccagattttacatactactacaaaaacttgtatattggtataagttgaatttaaacttgtatatatacgcaatattactaatacatactccctccgtttggtgcccattggtgctaaaagaacaacactactacagaaacaacgattggtgctagttgggaaatccgaggaaactctataggtgtcggattttccaaccggcaccccacaggtgacacctttgaaaaaaaaaggcggcttgatatatcggctcaaatcgagccgttgcatcgagcagctctcatcccaaatccacatatcaccagccatccatcccacatccacccgtggcacaaatcaaagaaactgaatcacaaatttcggcgcaaatgaaaaattccatcacttcaattagagtccattacactgattatttgcatgcattagaggaaaataataagatgaacaaatcagaaaaataaagtaaagtccatccgcgcacaccgtgaagtaaccaacactcactgttatagagaagtccctttggccgtatgccacgccatacaggagagggaggaggcactggatctggccgctcccaagcgctgatgagaaggggcggtgtcggatccggctgctcccaagcatcggcgggaagggacggagaggaggaagtgcgagagagggagagaggccggtgctggctcaccgtgcatggcagagagagagaggggcatgtggccttgcaagggagaatgataggcacggttcaggataggagcgaatatgaaggggagaagagcgacatgtgcatgaagataaggacgcatgagggaataaggacatgatttttttctttctcatgctccacgcccgtcggctcggctcggtttgatggagtgtcaggttttttaaaactttatacatactcaaaagtgccggtttacaataggaatctacacctttctctgataggagtcatatatgctagttcttattaaaaatcaacacctatctcttcacaaatgtgccggttctaccggatgacacaccgcaagctggtgcctcggacgaaaaatgtgataattttagcatttccgtcacttacagtacaatctcttttgtgtgtttttgcagtagtgtaaatataataaaattactttcgaatagaacgcataagttgttggaattcagttggttttccttctgattatatctgaatgaaagtcacaaatgatgtttgatggttgttcagattttatctctttggttctgttcattttgtaccagcgattcttcagtttggttcagatagatatatctgaacttttgccttatcttcagattttggttttcagttttgatcttgttggtttgagctgtacgtggaagataagtctttatcattctagattttcaggccgacggaaataaatctgttgattgtttgttatccggcttagagataagattttcttgttgctatacaaggctatacttagagataagattttcttgttgctatacaaggctatataagccacgtactgcagctgtatttgttgatacaaagtttttgcccacattcatctgcttgttttgcatagagagagttacatcccacgaaagtccgctggttcgttcttggccgagtgcacggctgaggatacgagatcattgtatcttggaggagagccgccgtccatctcgtgcacctcggcgagggcgtgaatctccttgaagacagcgccgccggcgtgccttgatcaagctgaagctgccgttcatcgttcggcaacgagcaacatctgcagaacctgcaaagctgctgcctacgacacagatgacctccaacaatttcaaggagattcatcgtcatcttcgactcataggtaacagtttccatggccccatccaactcttacgatgatgctatgaagcctgagaggttcaatggtaatcactttaagcgctggtaaacccggatgatgtactggctcactgctttggatttgttttcggtcatcactgaccaggagccgcagcccggatgatgtactggctcactgctttggatttgttttcggtcatcactgaccaggagccgcagccaggcgagttctttcctggggctattccatatgctgatttttaccagaccaggaactttaattgtgtgggtagaattttgagcatgctttccgataaattctatgatatctacatgcatcatacctctgctcgtgtattgtgggaaactctagagaagaagtacagtgttccagatgctggaaaagatctgtacttggttgaaaaataccatgacttcaagatgaccaatggaaagtctatggtagagcaaacccaggaactccagcttctagtgggggagctcaaccatagtaagattgctctccctgacaagtttcaggtgggaatggtgattgcaaagctcccaccctcgtggagagattttgctactgctctcaaacatcgcagggaggaaatgactatggatgacctagttgcttccctggacgttgaagagaaagcccgtgcaaaggatgctccattggttaatgaagattataactctagagtgaatctcactgatacacatcagagaaggaacaagaagaacccaaaagagaacaacagtggcatgaagccaagaggaaagattgacaaaggcaacggcaagaaaaatggcaaaggtccgatgagttgcttcgagtgcggcaagcctggccactttgctaggaattgtcgttacaagaaaagaaatgagaaagtccagaaggacaagtctgatgatcagactgatgccaaggtcaatatggttattgacgaagctgaagttgcaaggtgcgtttcgaacatgtctcaaaaatttgataagtgtcaacctgcagattggtgggttgacactagagcaactgttcatgtgtgttttgatcgatctttgttctccacttttcaggaacagcaaggaggccgttctgtgactcgtcttgagagcaagtctagggtgctgggtagtggttgagtggatttgaagctttcttcaagaaaagttctgaccctacacaatgtgctcttcgtaccagcagcgaaagcaaatttgattagtggaagtctgttaatgaagtcaggccataagcttgtcttcgagagtaataaagttgtaataactattagaggttcttttgttgggaaaggctatttagataatggcctaattagactatctttgttgctgccttgttcaagttttagtgataataataaagctttcgctgtttcatctcattctgctcgtactgataattctttgtggcataatcgtctttgtcatgttaattacaaatctatatctcgtatgatgtcactagatttaattcccaagcatgacacacgaggtataaagtgtgaaatctgtgtgcaagctaaacaacctcgtaaaccttttaaatctgttgatagagacagctctatgcttgaattagtgcactctgatatatgtgagatgaatggaattttgactaaaggaggtagacggtatttcattacttttattgatgattgctctaagtactgctatgtttatctcttaagaacaaaagatgaagcttttgagcatttcaaaatttttaaagcagaggctgagaatcagcttgatttgaaaattaaaattttgaggtctgacagaggaggagaatacttatcaattgaattctctaagtttcatcaagaacatggaatcatccatgaaaccacccctccgtattcaccccaatcaaatggggtagttgaaaggaagaatcgtactctcactgatttagtgaatgcaatgctcagcaattcaggtcttccaaacaatatgtggggtgaagctctgtacacagcatgctttgtgctgaatcgtgttcctgcaaaaggaacagaagttactccatatgaactatggaaaggcagaaaaccaaatctgaattttctgaaagtgtgggggtgccttgccaaggtaaatatacctgttgtcaagaagagaaagctcggacctaagaccgtcgattgcgtgttcataggatatgcacagaacagtccagcttatcgtttcctggtagttaaatctgaaactacagaagttcgtgaaaatactgtgatggaatcatgtgacgcgacctttttcgaagatacatttccactgaaggtaaaatctccaagttctgaacctatttctgttgaacctagaattagcattttgtcagatgattcccttaatttaaggaggagcaagagatcacgaactgagaaaatgtttggtgaagattttatcatataccttgtcaatgatgtgcccagtactctgtcagaagcatttgcatctgctgaagctgcatactggaaggaagcagtgcaaagtgagatggactctatcctctctaatgacacttgggaaatcacacacttgcctcaaggctgtagggccataggctgcaagtggattttcaaaaagaaactgaaacctgatggaactattgacaagttcaaagccaggttggtcgcaaaggggtacacacaaagacagggagaagattactttgatacattttctccagtggctcgcatgcctacaattcgtgctcttgtagcactggctgctgcatatggctataaaatccatcaaatggatgttaaaaccgccttcctcaacggagagttagaggaagaaatatacatgcagcaaccggatggtttcgtcattcctggacaagaagataaagtgtgtaaacttgagaagtccttgtatggactgaaacaggccccaatgcaatggcatgaaaaattcgacaaaacattgatctctgctggattcactgttaatgatgctgacaaatgtgtatattccaggtttgatggagatataggtatcatactctgtctttaggttgatgatattttaatccttggtacaaatctgaatatcatctctgaaatcaaaagctatttatcaaataaatttgatatgaaagatttgggtgaagccaaagtaattctgaacattaaaattcaggaaaaggacaaaggttttgaactcaatcagtcacactatgtggagaagcttttgcatcgttttggtcattttaatagcaaatctgcagctactccctatgatccttgtttaaaattgcataaaaatcaaggtcatggtcttgaccaagtgaagtttgcacaaataattgggtctttaatgtatcttgcaaatactactcgtcctaacatttcatatgcagttagcaggctgagcaggtattcgagcaaacctgattcaaatcattggcatgctctagaatgtgttctaaggtatttgaaagggaccataaatcaaggtttgttttactctggtttcccagctgtgctggagggttatagtgatgcaaattggatcacttattctaatgaaatgaaatcaacgagtggttttgtttttactcttggtggagctgccatatcgtggaagtctgcaaaacagactatattaacacgatccaccatggaagcggaactagtagcattggagactgcttgttgcgaagctgaatggcttagggaactattgatggatattccaatagtagaaaaaccaattcctgcagtgctcttgtattgtgacaatcaagctgtgatagctaaagttacaagcaagaaagaaaacatgaaatcttctagacatgtgaagaggagactaaagtctgttagagacttgaggaatactggtgtagttacatttgactatatcaagacagaaaagaatttggctgatccattcacaaaaggattagcacgaaagccaatactagagttgtcgaaagggatggggctgaggcctgccaatgaattattgacagtggcaacccaacctgtttgattggaaatcccatgacacaggttcaatgggaaaacaagctgatctgtaatggtgagtactgattaaattacattataccccttgctattgattcaatacttctaatttgcaaggaagaggttgagctgtgtctcttaatggattcaaatctaagtgatgggatatgtgctttgcaggatatccttagagaatccacctacttgagcgtgattgtttggtcgcaatccatgaaagtttagctggccgcttcctaaagcactcatgagatccaagatacttgtgtatgatacttgtgcttcctaaagcacaaaactgaaagggctcttgtggctgtagccgtgtattgtgcgcctacttgatgatgtttacacaccaaggagtaaagttcaaggttacctccactgcgctcctgtgtaaattaagtcatgtactagctagacataaggttcaagtttggaaggcacctgtgtcgaaaacacaatatatcaaactctctattgctgaaacatcatttgtaactttgtgggggattgttggaattcagttggttttccttctgattatatctaaatgaaagtcacaaatgatgtttgatggttgttcagattttatctctttggttctgttcattttgtaccagcgattcttcagtttggttcagatagatatatctgaacccttatatttagattttggttttcagttttgatcttgttggtttgagctgtacgtggaagataagtctttatcgttctagattttcaggctgacggaaataaatctgttgattgtttgttatccgacttagagataagattttcttgttgctatacaaggctatataagccacgtactacagctgtatttgttgatacaaagtttttgcccacattcatctgcttgttttgcatagagagagttacatcccacgaaagtccgctggttcgttcttggccgagtgcacggctaaggatacgagatcattgtatcttgtaggagagccgccgtccgtctcgtgcacctcggcgagggcgtgaatctccttgaagacagcgccgccagcgtgccttgatcaagctgaaactgctgttcatcgttcggcaacgagcgatatctgcagaacctgcaaagctgctgcctacgacacagacgacctccaacataagttatagtcaaatttattttttttctatttttaaaaatcgaatttgaatttatatgatcgtggagcagcatatcacgtaggcaaggctcaagggatgtgcttgttgcctcctgcacgatccagctgtgcgtgctagcctgctaggtgatgttaggcacgtgcaaaagctacacgcacgtgtagattcagaacaagatttaagaggggacttatctccttcctccttcttcagttcttatgctcttcattttctctctattctcgtcttttcatctctccttctatcaaatagtgatccaacggggtagggagactcgagtccctcagcacccaccctggatccgtccctggctacacgtacatgcacgccgtcgaccatcaagcactcgtgtgcacgctcgcacgaagaagacgccgacggcataaggaatccaagtatccaacttgcttgcaaaatgtaatgaacatcagattctgaggggctgtttagttggtgaaataaaaatttttgggtgtcatatcggacgtttgaccggatatcggaaggggttttcagacacgaatgaaaaaactaatttcataactcatctagaaaccgcgagacgaatcttttgagcctaattaatccgtcgttaggacatataggttattgtagcacttatggctaatcatggcctaattaagctcaaaagattcgtctcgtgatttacatgcaaactgtgcaattagttttacctatatttaatgcttcatatatgtatccaaagattcgatgtgatgtttttggaaaaatattttggggaactaaatagttcctgaaggcaagctgttcagattgagaggcaaaactggtctgctcctgcctgtaatgcctgacactactctagcgtgagatctttgacctaattaaaagcagcatgatctgattataaattactattactactattactaacacactctgttctatatggttgcttcgttgacctggagctggaacagcttaggccggcgaatgcaggagcatagcagcagtacacgtggacaagataaacaaatacggcatgtctccattagatcgacaacgagataattaagcttgtcaatgagctaattaagcctgtttagatccgctaattaacaccggaaagaaaaattaatgcagggacgtgcaccacctacggatgaataatgtactccctccgtcaaaaaaaaaaatacctaggtttccgtgtccaacatttgaccacccgtcttatttgaaaaaaatataaaacaaattaaaaaaataagtcacgcataaagtattaattatgttttatcatctaacaacaataaaaatactaattataaaaaaaatttatataagacatacagtcaaacgttgaacacggaaacccagggtttgtctttttttgggacggatggagtagtcctgaaccaccgacctatgaggctatgtggattaatcttgtacggcaggcacgcaacatccaccaattagatccttgtcatcgtggtcgaccgctcagtacagtgtctaagggtaattcctccggtatttaaagtttaggatggataatgtctgattttcaagttcagagaggtaagtcagtcgaccgcgatagttcggaggggtaattcacactttttccttaaaataataccactgctattcacaatatcggctggatgtcatcgatattttatcaaattataaccatgccatatatacatttgaattaggtttttacataaaatatttttatacataccaaaatgcacccaaccctagaagctaacaagtggcacccacattatcatacgcatcttcgtccccaagccttatcttggctgttgtagaaggcaagtggtggcagcaagcagtggcaatcgggtggagcaagcggagcgatgagggtggagcaagcgtccgtggagcgaggagcagcaattgcgtcgattgcgtagcaagcaacagcagcggtagcggccggcggggaggcggtggatccaatagtggctcaaactagcaaactcagtggaggtggcaggtttggctatgggagaagcacatccggcgacagtggcaggtctggttgcatccaaagaaaatctagttgtagttgcagaggggatgtgggccttcctattttgaggctatagtaagggacttgttggatctcatttttttggtcctcagcctccaaaattatttggggttatgtttaagggccatgctggagttgcttagcaaagcccctaaacacagccaccaaaatagtttttgtaattgagggcgaaaaaggaggtctagtgccatattagagccaccaaaatagaaaggcccctaaatctcaccccataaccctccttcctaggggatctaggactaggcaacaatccctatccacattttttgtggcggaaggacacttctgccaccaccgccctccacgtcttcccttcggcacaggcgtcaacacattgttggccctcctctagccatttctatgtcaatcaccgtcctcccccacacctccggcacttccttgagcttcgccattgccgtttcaccatcaccagaactaactcatccgtcggccgtcatctcactcagtgatatgttgagccatcatttgtgtagtccccaacgtatgggaagcatcggcccgccatttctgacagcctcccgagctctacgcctccaccgcactccttatctggagcaccggtcaggccacgccacctcatgctcgattgttgtcatgagctcggccaccatgctgacatcattgccaaccgcctctagttacgcgcctcccactctccctgtcctctgcagccccctcctctgaggtccggctgggccacaccgagccaaaggccccatgcaagacaagtgtatgcaattgtgattttgaatatgtatgagttctatgcgttagaagattcatgtttgaataatggtggtgttaaactaggcataacatagcatgtatattgaaggagaaaaatggaggccgaaaaatggtgagttgctaaagttggaagcatttttaaggttctcgtgaaatacgaccaacttttaacctttagagactctgccattggtggatatggtcaagctatccacggcaagttattttttaaaattaaaggaaacttttgttaatctcagatgattacattaagttgagaggaccatattaagaacactcccaacctttgcataaataggatgaatagatttggcacggcaatcagccaatcacatagattttggtagccaaaggtacgccataatgaccatcaaatgaccaagttgtgtcgaacagtgagcactagtaattctcaatgatagggatcttcagcatgggaaagtatataacaaccacaaatctcagtgagaaaatcatcataatctgcgtaggcagtccaagaaaatcaggggtactactggggtagattatctggtaggggggcaatatagacatttatcagataggaatgcatgactcaagaatccagcaacacctgccaatctgcaacaaccaggattctgcaaatcaatgactgaaaatctgaagtaagaactgcaaaaatcattatggaattattaactgccggccggcagataatatcatgtctcagttcataccacatcaaccatcagaggacaacagttacaatagcatgaagttttccagacaaatagtactattccgatatggatgcacaaaagcctcagactttgtactcacaaacttttcaaacatcatcttcaatcgcactaatctccttacataaaaaaggtgcactgtcagcttcccactcacttaattgtatgacatgccgacagttcatttttcaaacgtagctgctcagacaaagaaatttggctgaacaagagatgcatgagcacctatctagtaaagagcacctaaaaacatttaagatcatcattgacaatttgggaatgattagtaaggtctatatatgctgatttacagaaggatcaccttcccccaataaatctggcctctataggagagctattcaattcaatacaaacaaacaagagagtaagtatgattattgcccagcaccaactcgttgacaagttaattacagtgaccatcactactcaatcacaaccgacagaacttttatatcaatgaaaatcagattgaataaataccgatggaaagaaccaccaaattaagaaaataaccccaaaggacagccatgcatgaaaaataaatgctaaaattgcattaagctaatgtctaagcagtgcaacttgcattgctgaagaaatcaatcaattatcaatgtccaagatcatatgctgactgtacattcatgctttttttttatacataactggacattcatacttactatgtttcatttacgcatagtactttattgcacgagcaattttgaagtccttgtggaggtaccactttttctattataaatttggtacctcatagtacactaaattttttatacctcatgatatctccttaagaactgtagaattgttcttattgcgcaaccttcgaattagaagatctgggccaaaatgagaaatattggattattaatcaagataagctgattacttatcgagatatatcattaaagacataaactcaaacttgttttcaaataaaacatggcacttatcttcatcaggattaatataattacacttaaatatctagcttatgcaatgaccttggatattactccctctatttcaaaatgtatgacaatgttgattttttccatagcgtttaaccattcgttttattaaaaattataaaaatattatttattttgttgtgacttattttatcatcaaataaactataatattaacttatactttacatatttatactttaaatttttaaataaaataaatgatcaaatattatgcgaaaagtatggtgataacatgcatgacagcatccgacagggatcctatcattatggacttcctatggttgtggggttcgatactcaagatttggttgagataatctatgggtcaaataaagaaacaaattataactattagcgtatttaaaaatacggtaattatcataatataaaaaggtaattactgtaagaaaacgataaaagtcaaaaatagttgatatgcagcaaatttattttcgttttcgttttggtcggtaacatttccattttcatttccatttccatattaatcggcctgtgaaaatcgaaaacgagggtcggtcgaccggagctgtatgtcagcatggggtccacgttggtcgcggcgtacgacgggatagaccggcccgcgggacagtgggaggagggaacatgatcttaaacgggcccaaatccaccaacacaggcccatcaaaccattcgcagcccagccgcgccacacactatcgatccagtcactccagctaatcgatctcactctcgtagatcgggctcagcggcggcctcgccggcgccggtcgaagccaccatggtgatgacatggacgacagcgtcgacacatcaggtcacaaacatttcaatttgtcggaacacaacagaagtcagaagaggcaaagatgattctccaaaccaacaaatattcattctgaaccaggcacgtgacgtccagttttttttttttaaaaaaaacaaagtaaattgaaaagacgcctacaatttagatttaacacaagtataactcccaacataccaggacagaaactagctgatgctgtaacagccaggagcaacctcaatacgtatacgaatcagatgacaatgatcttggctttgctagacgccctcgggagagccagtaacttggtaagaaccctgaacatgcaatcatcattcgggacatccgcgtcctccctgactatcttcagttcctctaaggtgggtgaccatctcaggagcagtccaacaagagcgatttcgtgttccagccccacgaaatcgttaatggtcaccgtcacgaggtgatgcaaggtaggctcttcaatctccgcctgatcgttatcccatattggctgataccaaaattcttcatcgctgtagaagctctgtagaagttgaagcaactagtcagtgcaaccacacggaaaaacagccgacggagggaaaatagtgccaagttaactgcagaagagtgcagggaagcatacccgtatctcaagttctctgaacttagaggcattccgaaatattgaacaagcacccaagacctctgtccagacccaagagcacttctcaatacaaatcttccttagacgatcaaacacgcctgggagttctgccaacaagcacccttctgatagatactgccaccagaataaaaccaatgaattaccaatataattcaaccagcgtgttagttaaataacacaaaactattagtatgttactgtcaagaatgagccacttatagtaagttcttcgatactagttaggctgacaaaagcttgcttcagatagtttttcttgtcacccacaactgcatcagattgttctgcttctgttttgccgagtgtaagatacaacagattaggagcatgcagatgcaagtcttcaaaatccccttgaacctctaaaagctgtagtgtctgagcttgaatacggagacaactgataccctcaaatatttcagacgcaacatattcagccaggggcacgaggagatcagcttatatatatctctatctgtcaaggagaaatatttcagattcaagacagttagctgcttgaaaccttcaaactcctgaggcaagccaatggtgcatctttttataacaagtgtttctattctagttaggctgacaaaagcttgcttcagatagtttttccagttgaccgcttcttccgtttttgcgggtgaaatatacgcactggacagattgggtgaattcagatgaaagtctttaaagttccctttaacctctaaaacctgtagtgccggagcttgaatacggagacaactgatgccctcaaaatatttcaaacgcaatgtattcagcaagtggcatgaggagatcagattatttatgtcactgtctgttgaggagaaatatttcagattcagaactgttagccgcttgaaaccttcaaactcctgaggcaagcggatgatgcatctttttaagtgatttatactgtctcggcatggcgaccgatctatcccaatcacttgatttaagtatatatcgatacaaggagtatatattgttaatatctacagccgatcgagtagatttagttccttcttatttactcatggttgccgatcgatacatatatgacatcggctcaaagataaatgatatgtcatcggcacctagccgatcagctgtcatttatggatttaaccgcggtttctttgcctttatttcttgttgattgtagggtcaaatcaactggcacgctagcacacccgaaggcgagctttggacttgcactggagttaagcagatctcccaggcctcgtgtttttcatcaacacgcttttggcacgcctggtgggaccgattagaagtcaacagtttttctcatggacgagaagccgccagcatcgccatcctcggctagtccaggttctgttaaagagaagatccagcggttgggcctatctgaggttaatgaaggcaacatcgtgaccatcactccagacaagttgacacctgatcaaaagaaggatttcgaagcaatgatgcagcaagcacggaaccagttcttaagctcgttcatgcagacccgcaaggggacagtggtgcagaagtataaggtgaaggtagttgctgatgttcctggaaccggttcttctatggatggagaggtgaaacaagctccagatggttcggctcaaccaagtaataaaggtgctgccgatggcgatcaaggaaatcaaggtgatggctctcaaggagtacagggtgtcggctctcaaggagttcaaggtgaaggccctaatcaagacggcaatgcggcacagccgcagttcaacaacttccaagatcaggttgactatgctgtacaccaagctttgatcaatcaatctggaatattagtcaatactttgtcaaacatggtgaaaacaatggttgatggttcaatggctgagtatcaagctaccggactggtttatctaccaggaggagtgttcctaaactatcagccattaatcactgataatcaaccaattggccagttaattcctcttaatgcaccatcggttcagccaacggcaccagtatcggctcctgcacctgctgcaccaccattggctccaggccaattagttaatccccggttgcaggtaagagaacaaccacaacatagtggacataatgtgaatcggctaacgcaagatcaggttgcatctatgttcttacttcctcaacacactactgatccaacccagcagcagccgattcagcaaacgccaccaaggcagcaggttgtgcagccgattcaacaaacacccccaatccaacaggttgtgcaaccagttcagcatacgccaccaagacggcaggttttgcaaccaattcagcagacgccgttaaggcaacaggtcattcagccgattcagcaacaaggcctgggcagcatgttgcgaatcaagttgtcctagaacacttggttcatcatgtacagccagatcaaacggtgaacatttggtgcataatattcagccagaccttcaaaattaccaggggggcaatttgaattattagtatcaacctccatcaccccaagttcaatatcagcagggaggattggctcaaccccagtttgttcttcaatacaatcaatttgagcccatattacaacaacctcaaggagcacctcagcaacgaccatgggccgatatgattgcgaatgtgatgaaggagcagtttgggcttaggccgaaagattctggaaatttgtatcggcgaccttatcctgagtggtttgagagagtccctctacctaaccggttcaaagttccagatttttcaaaattctcagggcaggatagcgtgtcaacttatgaacacattagccgatttttagctcaatgtggtgaagcatcggctgaagatgccttaagggttaggttgttccggttgtccttgtctggatcggcttttacttggttttcttctctgctatacgggtcaatcaacagttgggccgatttggagaagcagtttcatagctatttctacagtggggtccatgagatgaaattgtccgatttaacggcaatcaagcaaagacatgatgagcctgtgcatgagtatatccagagatttagagagatgaggaataagtgctacagcttgagtttgactgatgcccagttagccgatttggcttttcagggtatgattgctccgatcagggagaaattctcgtctgaggacttcgatagcttgtcgcatcttacacagaaggtaaccttgcatgaacagaggtttgcagaggctaggaaaaactctagaaaggttaatcatgtctgtccttacatatatgggtcggatgatgaagatgaagatgactccgaaatagtagcaaccgaatgggttagaagcaagaaagttataccatgccaatgggtaaagagttctggaaaggaggagaggtatgactttgatattactaaggctgataagatttttgatttgctacttcgggagaaatagattcaacttcctgctggtcacacgatcttatcggctgaagaattgggcaagaagaggtcaaatggcataattctaggtctcatactactaattattgcaaagtcttcaggcagcagatccaggcagctattgagggaggcaaaatcaagtttgatgattctaagaggccaatgaaggttgatggcaatccttttcctgtcaatatggtgcatacagctggccggacagccgatggaggacgtgcaaggggttttcaggtgaattcggctaagattatcaataaatatcagaagaaatatgacaggcagcatgagaagcattatgaagaagatgatgatggcttcgatcctcattggggttgtgagttctttagattttgttggaatgagggtatgagactgccgtctatggaagactgtcctgggtgcggtaatgttgcagaaagttcaagccgatcgtataatagaggcaatcggctaaagcaaacaagagttcctgtttatcaaaggttgggtccagtgaaccaggattgtagccaggaggacaatgaaaacaggaagactcaatggtgtccttctggtatctttactaagaatcagaagagaagggttcaaagattgagaaaccgggaacgttttcaagaggtcgaactagaaatcagtcatcggctaaagaaaacaaagccgaagcaggagtggcgtattaagaatcaagttcctacagccgatgaagccatagccgatgaagcaaaaagattggccaaaggaaaacgcgttgtgactgcatcgattaacatggttttcacgttgcctactgagtttgggggtaaagcaagctaatgtcgatgaagttaaagaagaatcgactaaattgattttgtcaccagaacaagcagtcttcgagaagccagagggtacagagaatcggcatctcaagccattgtattaaatggttatgtcaatgggaagccgatgtccaaaatgatggtcgatggtggggctgcagtgaatttgataccttatgctacattcagaaagttgggcagaaacactgaagatctcatcaagacaaatatggtgcttaaggattttggtggcaatccatcagagaccaatggagttttgaatgtggagctgacagtcggcaacaaaatcatccctacaacgttctttgtcatcgatgggaaaggttcttacagcttgttgcttggaagggattggattcatgctaattgttgtatttcttcaaccatgcatcaatgcttgattcagtggcaaggcaacaagattgaaattgtgccagccgacaggtcagtcaatgttgccagtgccgatttagctctttgggagatggatggtcttgattgtttatctggaaaagtttgggatggagattttctaaaagtgtccgattctgatatacaaccaattgaagatggagaacccaagctataattttgagggcatcgtagagggttcgaatgtctacaccaaggacatagtagatgatctcgatgacaagcaaggacagggtttcatgtcggccgatgatttggaagaaattgacataggtccaggtgatcgaccaaggccaacatttattagtaagaatttatctttggaattcagaaccaagttgatagagctattgaaagagttcagagattgcttcgcttgggagtattatgaaatgtctggattcatccgatcgattgttgaacatcggctacctatcaaaccaggggttaggccacaccaacagcctccgagaagatgcaaagccgatatgcttgaacctatcaaggctgagattaaacgattgtatgatgctgattttattcgtccttgccgatatgctgagtgggtttctaatatagttcctgtgatcaaaaagaacggtaaggtcagggtgtgcattgatttccgaaatttgaataaagctacctcgaaagacgaatatccaatgccagtagccgatcagctggttgatgctgcctcgggacacaagattttgagttttatggatggtaatgcaggatacaatcaaatctttatgaccgaagaagatatccacaagacaacttttaggtgtcctggtgtaatcggcttgtttgagtgggttgtaatgactttcggcttaaagagtgctggagctacgtaccaaagagccatgaattatatttatcatgatttgatcggctggttggttgaagtctatattgatgatgtggttgttaagtctaaagaaatagaagaccacatagccgatttgagaaatgtttttgagagaaccaggaaatatggcctgaaggtgaacccgacaaagtgtgcttttggtgtatcggctggccagtttttgggatttcttcttcatgagagggggatcgaggtgactcaaaggagtgttaatgcgatcaagaagattcagcctccggagaacaagacagaattgcaagagatgatcggcaagataaattttgttagaaggtttatttctaatttgtctggcaggttagagccttttacaccattgctaagactgaaagccgatcaacagtttacttggggggcagagcaacagaaggctttggatagtattaaggaatatcttagctctcctccagttttgattcctccgtagaagggaataccttttagattatatctgtcgaccggtgataagtcaatcagctcagtcttgattcaggagcttgaagggaaagaaagagttgtattctacttaagtcgtcggctcttggatgcagaaactagatattctcctgtggagaagttatgcttgtgcttatatttttcatgtataaggttgaggcattatctattgtccaatgagtgcactatcatatgcaaggccgatgtggtcaagtacatgttatcagctccaattttgaaaggaagggttggaaagtggatattttccttaactgagtttgatcttcggtatgagtcaccgaaggcagtcaaaggacaagctatagccgattttattgtagaacatcgtgatgattcgatcggctcagttgagatagtgccgtggactttgttctttaatggatcagtatgtactcatgattgtgatatcggcttggttataatttcccctcggggggcatgttttgagtttgcttatactattaaaccttatgcaaccaacaatcaagctgaatatgaggcagttctcaaagggttgcagttactcaaggaagttgaagccgatgctattgaaattatgggcgattctttgctagtaatcaatcaattggcaggagagtatgagtgcaagaatgatacattaatagtctataatgagaaatgccaagaactaatgaaggaattttggcgggttactttgaagcatgtctctcgagaacaaaacattgaagctaatgatttggcccaaggggcatcggggtataagccgatgatcaaagattttaaggttgaagttgctacaataacagtcgaggattggagatatgatgtgcatcagtatttacagaacccatctcaatcggcttctcggaaactaagatataaagcgttgaagtatactttattggatgatgaactctattatcggacgattgatggggtgttgcttaagtgtttgagtgccgatcaggctaaggttgcaatcggcgaagttcatgaagggatttatggtactcatcaatcggctcataagatgaagtggttgcttcgatgtgcggggtatttttggccgacaatgctggaggattgtttcaagtattacaaaggatgttaggattgtcagaagtttggggcaattcaaagagcgccggcatcggttatgaatcctatcattaaaccatggcaatttagaggttggggaattgatatgatcggtatgattaatccaccatcgagtaaaggacataggtttatcttggtggcgaccgattatttcaccaagtgggtagagacgattcctttgaagaaagttgattctggggatgctatacagtttgttcaagagcatataatctatcgatttggtattcctcaaaccattacaactgatcagggttcaatttttgtgttcgatgagttcgttcagtttgccgatatcatgggaatcaaattgttgaattcttcactgtattatgcacaagctaatgggcagaccgatgcatctaacaagagcttgatcaagttgattaagaggaagatttctgattatcctcggtaatggcatactcggttagctgaagcattgtggtcttatcggatggcttgtcatggatcgatccaagtccttccttataacattgtatatggtcatgaggctgttttgccatgggaagttagaatcggctcaaggagaacggagttgcaaaataatttaacagccgatgagtattataaccttatggccgatgagagggaagatctggttcaatcatggttgcgagcccttgcaaaggttaccaaggataaggagtgagttgctcggcattacaataagatagtggtgcccaaagatttttcggaaggtaaacttgtatggaagttgattttgccgattgggactcgagatagtaaattcggcaagtggtcgccgaattgggaaggaccgttccaaatttataaagttgtatctaagggagcctacatgttgcaaggactcaatggagaagtttatggcagagcgctaaatggcaagtacttgaagaaatattacccaagtgtttgggttaatgcatgattggctgatgttgccgatacatgatagccgatgtgttcacatcgccttgagatggccgatatggttatatcgcccttagttgtttttatattgtaatcggttgtggtttgccgacgtgcaatggccgatatggttatatcgcccttaactgtttttcatattgtaaatcggttgtggtttgccgttgtacaatggtcgatattgttatatcgcccttagttgtttttgtaattttatcaatgcttttgacattgtaaaattaggggggcacatatatacgaaaaatgaaatttttgagcaaatttggaagttatattaatcggcacaaaggattgtcaagacaatgaagtaccagagtatcttagccgatcacaaaattttttaaggtctattacacaggtcaccgagacaaatttgctggatagccgaaatagccctttgcctgatttgttctacatcttcaatagcttgggcatcttgggcgtcggttccagggatgatttttaaagacttggtgagatcagcaacattcttgatagccgattttagccttgccttctgttcttcaacggatcttgggagatcggccagcttcttatgttctatatctagctcggcgtttcattcttcaagttgtgccaagagcttaatcttgcgagcctcgagccgatcaatgttggatttgatcgggccctcagaaagctaatcaagcttggacttctcttcgtgcacaagctgccgattggcttagattgtggcttcaatatccttgcgctctcgacgttcggctagtcttagtttggctttttccagcttgaattgatgttgctcaagatagatagctggagtaaggacgtcagctagctcgtctaggattagagcttggatctcgtgtaaccgagtcctaatcggcccactgtttaccaccaagttgtctagtgatgatgcctctagctgatgagagatgtcttcaagggttttcttcacatcatcggacaagggaactaaagacttgctggtggtatcttcttctgtttcttcatcaaaatagtctttaatgtcaaaagagaaaagatcggctaagacttgaaataatgatttaaagggagttagagctaaatagacataaccgatctaaattcccgtatcaaaagaaaacttactgggatagcaggagcagctggttgttcttcttcttcaacatgatggctttctacagccgatggagtttggccacttgatgattgttgcacagcagaagaaggaggaggaggaggctgtaaaaagaggcaaatgttagacaaaatcagctgaggtcaactagtaaaaattaagaatgtcttactggcggagccgatttgagaatcgttgatgccgacttcttctttacaacagttttcttcttctgtaattataaatctatgagtaatcggctataagtgaagagattgcaaaaagaaccaaagaaagttgctaacccttgaaaaatgggctggggcagaaggagttggaggagtttgcttaggtgaagccgatggagttcttttagtatcgcttacttcatctgcggcttgattaacatcctcgccgatttcttcttcatccagagcttgttcaatggatggatctagggcaggcagatcatcgaatggtttgggcttctttagcttggctttcttctttggatcaggggccgatgtatccatagccgatgatctgaatcttctctttttaccggcatcggctggttctctgatgagcccttggagaagagttgaagtcttgggggcattataaccgatgacaggcggagatggtccacctccatttggaattagtcccggggcatattcaatatccctgccactattgctctgatgaggaggagagaattttgtcgtctgcaagtcaaaaagaaaattagtcaagttatgaatcggctaggaaatcattcagacaaagttaaatcagggcatacctaagggataacatctggaaagaggtttgtcatgtacatggaaaccgattgatggaatagatgcagtttccattcaccccaccacctatcaaaatttttgcttctgaacattgccagctttatattctcaatgctgcccagaggaggtccttgaagattgagcagccgatccatcgttaaggttgatgagatttcccctcggcactggatcttatcggcaaagaataagccgattgggagttggcccattccaagttgtctagctgagctcattggatgatagaactcataagaaacttggatatttcttccctgatggatgccaacgggaaggatgcatgggctgattgcggctgagaaaacttccctggacttttggtatctttcgtgattgatgtcctcaaacctaaagtccgatgggagttcaaggttcgctgagtcttcataaggaaaccagacccgagcgtctttttgaaagccctcgtaaaagctacagaaccaatctttaagcagcccagccgatagttttgctctagcatcggctggtgtagatgcatattccccataagacatacatctgcgatgggtgcgttcctctccatcatcttctatgatcggctccagtctggggaattcggcttctgtcacagatggccgattgacaactttcatgactatcagatttagccaagtttgcagcagctaccatggtccacctgctccaactactaatctgatagctatcttggctgatgcattatttagcatttggtatagatagccgaggaggattttgcctagaggaaattgcttcttcgattctagggcttcggctacaaattgccaattagttgtaggaccatagctagatctacagaagaggaacttttctagccacattagcaagaaagctacatgttcccgaggagtaacaggccctttgcccatgtatgccgctacatagccagaccaacctcctatacttttggtcttgaaatcaaattgattcttggtgttcatgctcatagggttagccgatgaggttacatctaatccggtgatcatagtgatgtcaatcagagttggagtcatcagcccttggttgaacaaaaaggcattgatggtgttggaccaaaaataagtggcagcggccatcagaggttcatctttagatgaattggctatggtaagggcaagcgcttggccgattccaatctcgtcccagtgaactttcttgctagtagggctgtcaacgagctgagctcgagcgagtttggctatgtaggcttgagcttgacatgaactcgagctgagcctggatattgatcgagcttgggagtgagctcgagttcgagctcgagcgagcttcgagcctactcgagcttggcagcttgacttggtgaaactccaaagaacttacttttgtataagagatattaatgcaaattatcggtagtcaaaattaatgggtgctacttgttttgaatgaagcctctgcagcttttctcatgaattcatggctttgaaacgttacaattaacaaaagctagctactacatctaatatgaatagtagtactattactagcagccagataattgctttattgagaagcattgatgaggtcttgagacttgagcatgtcaagcacgatgacaagtatacattgacccatcaagaatatcttcctacatgcaatacattttatactaatcaagccctgccgagctattcgagctcgagcttgctaggcttgcgagcctcagcctaggcttgagcttggcttgtctagtattcgagccgagctcgaatcaagcctataacgaatcaagctcgagcagcttgcgagctccgagcttttttgacagccctacttgctacccgacatgcgcttgtaccatgtagtccagcttttcttgggcggagttttctcaagagatggccaagatttgaaggtatttttccagtgacctagatctgggttggctaatctgaaaggaatcctactggtttcaccgataatgaactcggtaggatcagggttgccgattgggccgaggaagtagtaattttcatgcgacaggctgggaattgcaactaggttggagacatgctacaaatccaaaagggggaaaacgagatgaggagttggagaatcgatctgttgcgaagaaaagggatctagccgatgagaacttacctcagcatactcggccgacggagtggcagacgggctggcggaagatgacatcgccgcgggcggagatctggtcggagatgggatcacctggggatcgccttgtgcgtcggaggaattgccggagagagagagggcaaagtttacttcggcggtgaaaacggaagaaaacggtgtgagtttctcgggtacaatggttagtatttaaagcgctgaaataactgccgggaaacggtaagagtggatttctcttggaatcgacatatggaaaatccgaaacattatccaatattccggacttggggggcatgtgttaacgactaaatttggtaatctaagtattggagatggagatggaatcaaagtagaattcgagatggaaattgatcggggaacagagtaagatcggctgaagttcgaatcggctacggctaagatcggcggagttcgagtcggacaaggttagtcgattgacctgaatccgacaatacaacttggtgtacgtcatcgggttgagttgatatgcttcaagatgattgccatgcatggatagagtcctgagaaagcaatcgtatctattaattaggatattttatgtaatttccttagagatatgtttgggcaaaagtctgccgcaaagacttatggtatcttagagtttgttagagataagagtcgggtccgatatggacatagtttgtaattctcgggtataaatagaccccgaaccccatgtagtcaattaacacacacgttcaatacaatctcgacgcatcgccaccctttttgctttcattttatttcgacgagttcttgctttcgggttgagctgcatcggtttcgatcttcaacaagaggtaaaacttgttatggcggcttgcgttctcgggattagtgcttccatctctatgatactctaatcttgtttatgtaatccgtcgagttatcatatatcttatataatctatagcaatatcgtcatctaacctacaatcagctaacatctactagtagaggtcagccaattaggttaaatatcgatgttggtttagattgtacatgatatctaccactctatgaaacttccaatggcttgattgtttatatattgtccttcttttcatacttatagctgcatcagttgtttgatcttatgagtcgtaattagaatctcaatctctagcttgcttcttggttgccgattagggtagtatcggggtttcagccaatcttacctgatttgactatacttgttatatatgctgtactgacatgttaaatctgccctttatattaagattttgtggcatttaagtgtattaggcttttgtttgatatattctgcttgctttaatatcttaatatagagtaatatcggagtattagccgatacatgctagatctatctgatcggctatgctatgaacatatatatagtcccattattaatatatatttcgatctaagtgatttatactgtctcggcatggcgaccgatctatcccaatcacttgatttaagtatatatcgatacaaggagtatatattattaatatctacagccgatcgagtagatttagttccttcttatttactcattgctgccgatcgatacatatatgacatcggctcaaagataaattatttgtcatcggcacctagccgatccgctgtcatttatggatttaatcgcggtttctttgcctttatttctcgttgattgcaggatcaaatcaactgacacgctagcatacccgaaggcgagctttggacctgcactggagttaagcagatctcccagccctcgtgtttttcatcaacacaaggccaccaagatgctcaccggccttggctccggctcttccagcaacaagaagaacataaacacaaacacaaccggcacgtgcagtgacatgctgacgtatgggtgcaggccgctgcttgcaacttcatgtgcaccactcccctcgtcctcccaccaccgccgccgctgtggagaaggggaacggaaagggagagagatataaggggaaaagagagggaggatgaagaagggaatgaaagagaggatgacatgtgcccccacatgctaactcaccagttggactaggttaacgaaccacgtcatcaaaaaccacctcaaaacgagtaagggaatcatttcgcagcggttcaattgttgagggttgttgcgattgagggatactaattagattggaagtatatttacactcagtcaccataaacccttcgattccaatctaacggatacaaatttagagggggcatttttcagaaaaccgcccgcatccatcacctaaatttactggtaatcgagagagcataaatagacttatttctagaccgtttgacccatgacgacccaaaatctgtgcgagacgagcaaccgggcccaacaaacaaagcccaactctatcggcgcgggcccacagaaaactctacacaattccgccgtacacgcgtggtccccaacctcagcctctttatcacccagcagaagcagagcaggagaaaaaaaaaatccacatcactccctcacactctcactcgtagcgaagcaggaagctagaggctagagctaaggcagacaagacagatggcgcagcgcgcgtctcgccgtcccgccgcggcggcggcagcagtcgtcgtggccgtcgtgctcgccgtgagcggaggcgtcggcgcgacgccggagacggcgtgcagggcggcggcggaggaggacaggcgcgtggactacgagttctgcgtgtcgcggctgagccaccaccacgacagccccgacgcggacacgtgggggctggccaaggtggcggccgacgtcggcgtctgcatcgccggcgacgcggcgtacgacgccaaggcgaagctgcaggccgccaaggcgggcggcgagcgggaggcgctggagcggtgcgcggagctgtacgaccggatggggtcggcgttcgcggcggcttacgacgacatcaaccggcgcgagtacgcggcggggaaggagaaggccggggaggcggcgtcgctcgcgcggcggtgcgacggcgccttcgccgacgccggcgtcgccccgtcgccgctcgagcggcagaccgcggagtccgtcaagatcgccatcgtctgcacggccatcaccaacctcgtcaagtagacgaaacaagtgttgtttccttcgcttaatgcaggttaatcttagaggaataaacgagcgccattgttgatttctcgtctgctcgatcgttcgattgctacgcatgtactagtagtagctaggttaatctagaggaataaacgagcgacattgttgatttctttgcttaatgcagcgctcgatcgatgtatcatctttccataatgtcagtgttattaattcctactgttttctcttcacgtcttcgtccgcggcaaagtcgccggccggaaagctccatccggcgccggcgagctgtgctgcgagatttactacagtgtacagtgcctgagcgagtacggacgaggtgtcgggtcgggggcgattcacgtgcaggggacgccacgtcgccgcgtgggaggagggaagccgagatgtcgctgtccgggcagcatgggatggggcccgcgcgtggcgtgggggctacaccgagctaccggtcgagacacttggcgcctcctcctcgcggctgcctggccacgtatgcacacacgcgcggcacgacaggtcagctaccgggtacacgtaggccggggtagacccgccgcggcgccatttctgccatcgatctcttgctcgtcgatcggcgcgtggagcgctgcgtacggatgaggattatcaacggcggcccccactagagatccaatggccagactgacaggcacgagcagccaagtgcacatggactgatgtgtatgtgtgatggacagcttatctgccatagaaaaattcaaaatttaaacacctgggctatgtttagttcgcaccaaaattagaagtttggttgaaatttgaacgatgtgacggaaaagttagaaatttgtgtgtgtaagaaagttttgatgtgatagaaaaattggaagtttaaagaattattttggaactaaacacggcgttgatttagaagggcctgttcagctgccaaccggaagtccggctagctccaagatagcaggggctacagcagccacagctgcaatcccagcttgccaacaggcccgaagttgattttaggtttttttttacacggtggtccattttttcagaggtgaatttttgaaccgctaataacacagatataaaaatttatccataaattacattaagttgtttcatatattattttcacagttcaaaccatagagctcgattgtggttgattagcgaacggaggagttgtgctacggaaaaaggagaaccttgttttcttcattgatcgatgcaagggaacgtacagaagttttgcatgatgaggtcgtcggtgatgtagcacagtggtatggaagtcggagctcaatagctatcttggttaagcctgtggggtgtgggagtttgagttcgatcagtgctaggtctcggcttgacaacaaatgcatgcgactcataagcttgataatggcaatattggggttaaagctttccggtcaatgtgggaactgtaggcctggagttcaacgcagcaacgacttgtagatatatatacctcggaaatttggccggtaagagttggcccaaggctcagcagggcaacacctttaggcttcaacactgcactaatcctagctcatttctcacgtgtgctcatgtcttgatttcatgaatctgagagtgagccaggcaaagctagatcgagagagagatggtgcacgtggtggcaacacaattcctcccttagacactttcttggttgttcatgtgcataaccgcctgcctttcgcctagtcgtggtgcccaattatctgcaccccattgttgtcccttatctctgatatctgcctcatgcctctctagaccctgcgggagctgcccatatcaattttctgtcccctagctcatctgctctctgactcttcattcatccaccaaggctctgttcgcaaagcccttgcctctcttccctctcgcatgatcagagaaatcccaaatcctaatctttcatctaaatttttagactagagtttcaatctcaatgagttgatcccgttcatgttcattaatttaatagatatagaagatgagagggttagaacaatatgaaagttccattataagccaaaatcataccgtgcgaacatgagccagtactactcaacaagcccataatgccatatacaagcttattggtaaactagttagcccattgctcaaaatgggaaatctacaaagaagtgtgtgtgattgttcaaaattaatttaattggttgaaatatagtattggtgattgatttggatcaagatgtggtgctacaattaacaatgatcagagtttatattatttactgttctactaatgtattgatgtgtaaagcttttgatgaggatgttataggcttggaagaagctaacaggtaacaacatatttgcacttttatactaaaccaccattaaattttgatcatgcctagtgtgagtagcatttacggtttggggaattgagagtcgtacttaaggcttatttgtaaggactcaaactcttaaaggtttagagcggagtttgtggagcagctcgaacctttcttcacctttctaagaccctatttagatgtgactaaaacttttaagtccctattacatcggatgtttggacactaattataaatattaaacgtagactattaataaaacacatccataatcttggactaattcgcgagacgaatctattgagcctaattaatccatgattagcctatgtgatgctacagtaaacattatctaattatggattaattaggtttaaaaaatttgtctcgcaaattagctttcatttatataattagttttgtaagtagtctatatttaatattataaattagtgtttaaatacagagactaaagttaagtccctggatccaatcaccacgcctaatttatttcgtaggagcactgcagcatcgctccgttttattaggttaagttagaatcatttggttaggttgtagcttcgagagagctctatcaaacatgcaagccatcaagccgttgaggccgcccgggcgcgcgcatatacacccatacgtacgtggggttctaccggactaccacctgtgcccccctgcattatacacccgtggcccgtcagggtcgcggcacggcgaaaggcgccgcacatctcgacgagcctaaccaaaagccccatcaaaccatacgcctataagtagacgtacgtacttcccggtgatcccctcaccgccatcaattctatcccagcaaactgcaacgatctctcaaaatcacgcgagctaatcatcactcccacgtctcagctcattcgtcctcgtcgcgcgcacacgatcgatcgagtatggtgacgatgctgatgatgatgaagccttacacggctgcccttctcgccgtcgccgtcgccgtcctcggcgtcgtcgccgtcgacgcgaccgtggtgacgacgtgcagggcggcggccgacgcggacgcccgggtggactacggcttctgcgtggcggagctgggcaagcaccacgacagcccaggcgccgacgcctggggactcgccaaggtggcggcgctcacgggcgtcgtggacgccgacaacgccgcgtacgacgccagggacctgctggcgaaaggaggaggaggcgcggcggcggcgctcgcgcggtgcggggagctgtaccgcgcggccgggttcgcgttcgccgaggcgcacgacgacatcaacgcgcgggactacgccgccgggaagggcaaggccgcggacgcggcgtccctcgcgcgccagtgcgacgccgcgttcgctggcaaggacgacgccgccgccgccgtgccgccggtgatcgcgcagcacggctcgtacgccgcgcggatagcgatcgtttgcacggcgatcaccaacctcatcgagtgatcagtgtgtggggccacctatacatttgtcgacaaattttctactaaaaatttgacagatgtaattatagtacaatcgtagtgtaattacaatgtaacttgtatgtaattacactgtaacttgcatgtaactacagtgtaacttgtatgtaagtttcacgtaattttgaatcgttagatctattacaagatttgttctatggaggaagaaaaaaatcacatcacacacatatatgaaagaatttgttcccacgacctctattttactgaaataacatgttaccgagagattcttgaaagttacatacaagttacattatagttacagtgtaattacatgcaagttacagtgtaattacactacgattgtactgtaattacatctgacaaatattagggggagaaatttgatgacaaatatctagcaaaatcggataagataaagaggttaagtgagcgtggttaatttagttgtacatattcaagcgtgtaaagccatatatggatctataataaatgtgtggttaaatccatgaagagcatgctgacttttgctacatgaagagcatgctgcgccaaaaaatcgtactaggttgattttgatatgcagcccaaactcatgcaatccctgttcatctttaactggctccttcatgacgttgtccctaccgtcgataccgtcgactagatccattcgatttagatccgacaactcccgtattagagggtataccggtcattatgtcggatctagccatctcagtcgcatccataccgctaacgggttcatcgtcttctgttcttgctgcaaccacctcgctcatgtgaaactaggtcactgtatctagccgtatataccgtttgtaccacatccgattctatcaacgttttccatggtattatcgagtctatgtatgttgtccggccacaaccgccaccaaaaacctccttggtagttggcaccccaacctgtagcccacatcgccactcattgctgaggacattaagcatcaagacaaaacaatcacaaatgcaacgacagtcacccttctatcagacgagacgtcaagccgcgctctatcatcttccgtcgcctctaacatcgcgcggcttgaacccaaccgtaatgagcaggtaccttttaagaggctaaccaaatcacactcaataatagagagcatatccagtgagaaataaaaatataccaatgtattgtccagtgtggctgagttgaaagcaaaccataccatttttttctatgctaggcaaaatttgatatgagaagtgatatacctatagttgtgttggagatgcctttatcaaagtttattcaaattttagaattttttgtcccacttcctagcgaaatggttgtactttccaaaatatatatagttccctgtatatcttagagatgactactctagcgacacacacgatattaggttttacatatgcattattagtctagtgaattatgtacttcctcaatataaatgcaacctactataaatatataaatgcaacctactataaatatgacatattctaaaactacgaatatgaaaaaaaatatgtaaaatctgtattagctaggttgcatttgtattgagataggaggattgattacctgtaggctgtagcatatactccctccattttttaatagatgacgccgttgactttttctcacatgtttgaccattcgtcttattcaaaaattttatgcaaatgtataagatataaatcacacttaaagtactatgagtgataaaacaactcataacaaaataaattataattacgtaaattttttgaataagacgaatggtcaaacatgtgagaaaaagtcaacggcgtcatctattaaaaaacggagtagtactggtatatgctagcgtagtgctgtacacgttgaggcgtacggtcagttgcttacttgaactgcccggatcggagctcggtctcatccgtggcgaccggtggtggccggcaacgcgcgccggaaagccggaaaggtggctacacgcctgaatctgaataatgcgccatttggtcaggccgtccattaatttgttaattttatcggaggccagcgtgtgatcgccggccacagcccacagctagcactaacgatcgccatgcatgcacgttttgatcatctctctcgcttttccatctttaagaagaaaggtgaaaggctactcccagaggaaggacgcatgtacgggtacgaggtcgatcgagatcgagtgtaatcttatcaaactagcttagctgatggcgtatgaaacttataactactgcttgctgtcccaaaacgttactatctagttctcagattggatatttcctagtagaaggagtctggcagacatttgttggactagaaaatatcgaatcagatagtaggtaataacattttgatacataggaagtacttgtagtgtcgggttgtcccttcattttcttagttattctcaaaatgtttatcgatattgtattttctccgtcctaaaatataagtgattttggttagattagatgaaacgtattcagtattacgaatctgaataaaattgtttagatttgtagtactatgaatttaggatacgttctatccaattctagattgttatatatatttcgggatgaaggaattagctccagatcttttcatctttggccaacattttgttccaccagatctttttgatcagccagtaaagtttaaaccttttgagttttgactagaccacatactatgcatcaggttgaagactgacaacagctggctgaacgcactgtagaattataatccatctttgatgggctagctagctgttctgtaaaggcccaaacacctgtgctctctgtttatgttaatataatcagaggtgctttgctttgctcctttccattagggtacggttgtgccttcaagcaaaagacacggggatcataagtcatggaaccgatgcatataataccaattgtttacacttccaccactaatgctcaggtaggtaaaataagtatgagaaaggtgtaagttttttagggccggtctctcttataaactggatcaactctcttttatacatttagtagaatttatgctatcgggagttttgtatgttcgattagatttaataaaccagcgtgcaaacaaaacactaaaaaaaaagcacgattgaaaaaagttttaaagagtgaaacttttacagatttttattatctggattgtattatccaaagggctacaatttggaacattaaagcctcaaagttcagattcctcgatgttcgtgggtttattgttgcaaaatccctgaaagccttttggaattcacctgaagccccaaacagaattcagtgatcaaccactagtattatatttttcatcttgaaatatcaagtcgcaaacatttgaagtaaatggagcttgctgaccgacttctagtttgttgaacgaacagaagagacatggcaattctccaaccaagaacattcattctgagcaaagcatgtctagttcaaagggaagatggagcgaattaacagactactaagatttagatttaacgcataacccccaaaatccaaggacacagactaacagcagtagttctgccacaagcaaacgtcgatatgaagcaaaaacgcagccgaatgacctggatgtacatgaatcagatgacagtgatcttggctttgctagacgccctcgggagagccagtaacttggtaagacccttgcaaatgcacatgtattcatcgttaacgttcttggccctgaatatcttcagatcctctaaagcaggtgaccagctcagtagcagtccaacaagagcaacctcgcagttgagccccacgaaatcgtttatggccactgtcacgaggtgatgcaaggtaggctcttcaatctccgtctgatcttgatcccatattgtcttacgcctataagcttctggacgtgggaagctctgtagaagttgaagcaattagtcaggcatacacagttacacacaagcacgaagaacacaatcaacagaaaggcacggcagtctacagatagacaaaaaatattgtcaatttaacatcacgaggctggatggagatgtacccatatctcaagttctctgaaagtaggggcattctgaaatattgaacaagcacccaagacctctgtccagttccaaaagcacttctcaatacaaatcttcttcagatgatcaaacacacctgggagttgcatcgacaagcaccctttggatagatactgctaccagaataaaaccaatgagaattaccaataaaatttaatcagcatgatagttaaataaagcaaaactaataatatgttaccgtcaagaatgagccacttatagtaagttcttctatactagttaggctgacaaaagcttgcttcatgtagtttttcatgtcacctacaactgccacagactgttgggcttctgttttgtcgagtgtaatatacacatgggacagattaggtgcattcagatgaaagtcctcaaatttcccttcaacctctacaatctgcagtacctggccttcaatacggagacaactgataccatcgaaatgtttcaaacgcaatgtattcaaccaagggcatgaggagaccagagtatttatatcatggtctgttgaggagaaatatttcagattcaagacaaatagctgcttgaaaccttcaaactcctgaggcaaggcaatgatgcatcttttcataacaagtcttactatgctagttaggctgaccatagcttgcttcagataatttttcctgttgccttcaactacaacagattgttgggcttctgttttgtcaagtgaaacatctaaattggacagattaggtgcatgcagatgaaaatcttgaaagttccctttaacctctaaatcctgcagtgctggagcttgaatactgagacaagtgataccctcgaaatatttcaaacataatgtactcagcaaggggcatgaggagatcagattatttatgtcactgtctgttgaggagaaatatttcagattcaggacagttagccgcttgaaaccttcaaactcctgaggcaaaccgatgatgcatctttttatctgcagatattccaaatcactgagagagaagaggtttgacgggatcttatagttatgcccagagtaaaacttgattgtaatggaccttggttttttccttgacagcatgtacatccacctatcaaatacatcatggtatcttttgaaccctagaattgaaaaggaagcaagaggtccattgtggagcaaaagggccagatcgacgagcgtaataaagttggagcgttgtgtcgtttcagaggaaccccagctgagatacaaatcacaaagatatatttctggcaaagtagtccacacattcctccaagcactggataggatgctggctctaatagcatctaaggaattcagcttggagaggatggtgacctttatctcttgaggtaggctgctgaatttgtctgacctcaacgcagatgatggttccacctttgcctttttagcacgatgcatcgctccagagacgattatagtgacctcgcaattgtcgaacatcttggtgtagattatacacacatcaagtaaaaaaaaaaaggaagcagaaatcaatacactgaagacactcaagagcatataggtactaaatatggcaaacaatatgtgaagctcaaaccatacagatgatacagtaataggagcaagtggcattatgattcaattaattacgagcatacatgctcatcctatacactattgcactgcctatttccaaaagaccaaaagaccaaaacacacacacacacacacactagaaatcgctgtggttctcgaagttggaatcgccatcgcaacgctgcttaaattagtggggatagtcccgttgctctaaaacactacaaatcgttgcctactagtacaactagtatatatggatttgggacacgcacaggatctgcctcaagagcaacagatttgcatcaggatggatcgattttcgcttggcacgaggaaaatgggaggggaggggggcggaatgcgcgccgagcgacgagcgagcgatatacctagggtttctggagagttggagcggacgggcacggggagcagcgggtcgccacgacgctcctcccccttccgccgccgtgacggtgtcgatctttagggcttcgctcgtcctgcaatggcggcgcttgacaagcgccgctaccagtgaggcagggaacgaacagttcggggccggaaaagagataataacacggcggatttgcttgaaaactttcacaagtttttcccccaaaactttcatatttgtgacatcgtatcgcctcaagatttatatataaagagaaaaaaattgctagaaaaaaatttcacacatgtcatgtgtaagataccaatgctatctaactaaagcattgtttttttcgatgaataactaaagcattgttaaatgtaagttttaataagttatatcgtagctataatgcaattacaatataattacacttcaattataccatagttatatcggaaaatttttaaccaaaaatcttgcgacagtttcttagatactcccttaacataatgttcgggacatttaactatttgtcatttgatctatatattatagaccaatgatgactctaacaaataattaaataccacatataaaaatagtaaatagttaaatgtgccagaaaaaaaagaagactacttgtgaaacatcaagcccatttgcattcaactttgctagacgtgttagcaaattttttattttggagtggtgggggtagagggagggggttgttgaaaaaaagagcgaatgaatttattttatgaaaagtttttatgcataatgttatagttatactaaggtaagacctactaccttggtaagaaaggttggacatagaattataagaaagaagatgaaattaaattgaagaaggttgtaattagttgaggaagaggaaataaatagagaaattaaaaggtggaagatttcgattggttgataagataatataggtaaagaaggtgttatattttgaaataaaggttaaatgttagaagttgttatattttaggatggaataagtacttatttacttttactttgcactagagagctttgcaaaacatttcgctgtgaaccactcttttcgtattcaccctctttgtgttgtctctcacttcttaacttctagcgctagtgactagtgagcaatgtcatccccgttggccacatgtatatgtgaatagaggttgaaagtaaagtaaatagctcgttgtacaaaacaagtataattgtattaggtttttttttttgcgcttcagttccacctctttttaaattagatcctaaccaaatagactcagcttacagtgggttgaaatgatttgaaaaaaatgaatagaggattgtagcaaggttctagccgctccgcagctctactccaaactatggtcctgagttaaatttagaagttagggccataccaaatactagaaaagactacttgtgaggcattaacaacccttgtttgctcttcaacttttctatgcatgttttaacgttttctccaaaaatatacattgtgacatatttttacttaattgacacattagtaaatatgaatttaagcctaacaattagttatttactagtatgattcaaattatattcaggcataaaaaaatatatttgtgagagaattcatttttcatttggattagctatgaattttcaaatattgcattcaaatttaattcgtggaaatttaactgtgcgccacttgatgagctcgtcggatttataagttggacaaaatcgacttgcggctggggtggcgccggccggcacgggcgcgaagacgtccaggtgctcgtgcgggtgccttgggctggcatggcattcggctgtgctaaaccaacgtcgaacacctggtgtgcaagggacagatttgaaccaccctccacactctggaagttggaaaatccaaatcattagattgatttggattttttttcaattttcccttgaataacgggatttctttaaacagatgatttaattggtttggattactttatgttctttattgggatagataaataatttcacaaatatttggatcttatttctccttacttcaatactatttatataatttaccgtaaagagatattttagttcctattcaaactaattgggtctttatgattggttaatattttgggaatggaacattttgtgcacactcgtatttatatatttttcatcaatgcattctttaattcactccacatatttccagttgtacctttattgttttccataaccatgattcacttcacttctatatgttcgattagatttaatataccgacatgcaaagaaaacagtaaaaaaaatgcagcaagatgtaaaaaagcaaacttccacatatttttattatccggattatcacaagggctgtaatttggaacgttatgcctaaaaattcaaatttcctaatgctcgtgggttcattgttgcaaaatccctgaaaacctttagaacctatgtaccaaacagatttcaatgaacccatcaagtattatgttttcatcttcaaatatcaagtcgcaaacatttcaagtaattggagctgtggctgaccaacatcaaatttgttgaacgaagagaagagacataattctcgaaacaagaacattcattctgaaccaggcatgcccagtttaaaggaaaaaaatatagagaactcaaagagacacctacaatttagatttaacggaaagtttaaccctcgacatcccaggacagagataaaattagcgcaagtatagcccccaacatccatcccaggacagagactaagtaacagtatttatgcccctagcaatgtcaacatgaagcggaaacgcagcaattccgaaaggtatatgaccgggaggtatatgaatcagatgacagtgatcttggccttgcacatgcacatgccatcgcccagggttaaacttttcggtttagccgatttgatcggtactcaccgaaattccgaaatttctgaaattttgaacaaatattaccaaaattcacggaaaaattaaaaaaattaaaaatttcagctgaaataatattgtatcggaggggtccaaaatgactcggaaattttgttccggaatttccaaccctgccatcgtcctcgttctcatcacccttgaccttgaatatcttcagttcatctaaagaaggtgaccagctcagtagcagtccaacaagagcaacctcgcagtcgagcccaacgaaatcgtttaatgatcactgtcacgaggtgatgcaaggtaggctcttcaatctccgtttgatcctgatcccatgtccttttacgtctaaaagcttctggacgggggaagctctgtagaagttgatgaagcaactgaactagtcagacattaacacaaccgtgaaagaacacataaaagggcagtgcagcctacagatggaaaaattgtgtcaaattaattgcaggagagtgcataccttagtgggatgtgttctctgaatgtaggggcattctgaaatattgaacaagcaccgaagacctatgtccagttacaaaagcacttttcaatacaattcttcttcggatgatcaaacacacctaggagttgcgtcgacaagcaccccatggatagatactgtcaccagaataaaaccaatgagaatcaccaataaaatttactaatcgtcacgattgttaaataacacaaaactaatactaatattttaccatcaagaaagagccacttattgtaaccaccaaataccttagcgaccttagcgggatgtgcttctatgcttctaaaagaaaaactgcacgaaaatcaaagcacatcagtgactgagattaaaagtgggattaacacttaatcatcattagcgaggggtattttcatccacagatttttgagcccatgaacagcccaatcgatatgaagcgatctggcccacccccaccagtccaccacaacgctgattccttcctccgccagcgagagctgcgtcacgacagcctcctgcgacgcgctgcggatgtgtccgctcgtcaaggaatatcagtagggcctatgaaataatggcaaaaaaaattaatgtgttcataacaaataatccagggagaggctcccatagcaaatggcttgatgatagggtcagttattcatgttgacttataatgttgcttatccatgataatctttctgacgtgctaacccatgacaacttggtttattgcagattgtacactcttacagtctaataataaaggaacgacgcaacaccattgagcacaggaaaaacattcatgttttttatccaaccgcccttaattggatggcggacaatgtacaacattctcgtaaagatggctggggaagtcaaacaagcgttaatcaggctctcgatattgcacaaagtgatttggtaaaagaaaacctacaatttggtattcaatttgagcatcatatattttaacaataattttataggtccttttcccatttgttcaaaacaagcactggagtctattggtactagataacctcgaatgacagttttatgtgttggactctttagtggacatggcaaggtacaaaacatttctacattcagtggtaagcatttaaataacttttgtagatttgaaagatagtagttcaatattggtaactgttgccttgatttgtgtagattaaagtaataaaaaacgatttggatgtggctactagtcaaggtatttggatgccaaaaaattcgtgactggaaacccaagcaattccacaaagttccaaaacaaaaggacttacaaaaaaatcactcaggtttaacatttacattatacactaagaactttaaatatatgcctactttatgagtaataaactttttttttgtccagcacgacatcaatgtatttaggcggcaattattgggagagttgttattgcctgataacaacatcattgaagatgtgaaaatgagctaaacgagattgtcgattcgctctagaatttatatattacagcaataaatattatttatttgttcaaggaatgcaacttatttatttatggggaaatttctcatcataccgccattttttactacctttgtaaaaaaaatggcgatatgatgagaaacttccccgtaacgaaaatccataaattataaatgtgaaaaatctcaaatgtgttattacaagcaaatttgatcactcccttgaataaataaatagtaacttgtatcccttgaataaataaataagttgcatcacttgaataaataaataagatttattgatgtaatatataaaatctagagcgaatcgacaatcttgtttatatcatttttcacatctttaataatattgttatcagacaataacaactctcccaataattgttgcttaaaaacattgatgtcgtactggacaaacaaggaaaaatgtttattactcataaagtaggcacatatttaaagttcttagtgtataatgtaaatgttaaacctgagtgaattattttgtaagtcctaacccatcaaacagctcgatgtactttagtacatataggccgcatgaacatctataaaaataaaacaaaaaaaagaataattggtccattatagagcacgtatattatactattagaggactcacaaatcattttgtttcggaactttgtggaattgcttgagtttccagtcacgaatttttggcatccgaatgccttgacaagtagccacatccaaatcgttttttatactttaatctacacaaatcaaggcaacagttaccaatattgcactgatatctttcaaatttacaaaacatatttaaatgcttaccactaaatatagaaatgctttatagcttgctatatccactaaagattccaacacataaaactatcattcgaggttatctagtaccaatagactccaacgcttgttttaaacaaatgggaaaatgacctaaagaattattgttaaaatatataatgctcaaattgaatacaaaattgtaggtttcttttaccaaatcactttgtgcaatatcgagagctcgattaacgcttgtttgacttccccgaccatctttacgagaatgttatacattgttcgccatccaattaagaacagttggataaaaaacattgaatgtttttttcccgtggtcaatggcgttgcgacgttcctttattattagactgtaagagtatacaatatgcaataaaccaagttatcatgagtaagcacgtcacaaaggttatcatggataataagcaacattataagtcaacattaataactgtatcatcaagccatttggtatgagggcctctccctggattatttgttaaacacatttttttgccattatttcataggcctcgctgatattccttgacaagcgggcacatctacagcatgtcgccagaggcggccatgacgcagccctcgctggtggaggaaggaatcggtgtcatggtggactggtaggggtgggcccgatcacttcagatggattgggctggacatgggctccaaatctgtggatgaaaatacccctcgctaatggtgattaagtattaatcccgcttttaatctcagcaactaatgtgctttgattttcatgtagtttttttagaagcatagaagcacatcctatatttcaagatgctggctctaatactaactccgtttcaggctataagttgttttgacttcggtcagagtcaaactacttttgacttcggtcaaagtcaaactaatctaagtttgaccaagttttatagataaatatagtaatatttacaacatcaaaatagttcaattaataaatctataattgaatatatttttataataaggttaaaaaaaattctacaaacttaatcaaactcaaagcaatttgactttgaccaaagtcaaaatgacttataacctgaaatggagggagtagcatctaagacactcaacttagcgaggatggtgacctttatctccggagtaggtggctcaatttgtctggactcacatctgatgttgattccacctttgccttttttatcaagatacatcgctttagaaaccggattaaagtgacctagcaatcatcgaaaagcttggtcattctacccacatgacaacaagaaaaaaaaagggagtggagaatcaatacactgaaggctcaagactcaagagcatagatattgaatatgacaagcaatctctgaatctgataaccatgcagatgaaacagtaataggttctaagttgcattcagatagctattcatgtgaaatctaggatgcaatgcaactaaggaagtacggccatatttattaatactatgcactactccagtgccaatgccctaaagacaacgacttacttactagatccacactaacttgtactacaattttatattatataaaaaatatcttcgcgctaagagatgaagtcctctctttttttttgtgggaaaaacacaatttttatactgttgaaatttagtcgaaatcactttggttctcaaagttggaataagttggtgtgccatgaatccaccatcgtaaacactgcttaaattagtggatagtcccattacccaaaattcctgaaaagaagggagccgctagccacgctacttattgttgcctacgagatactgattgttgcattgttgccataagttttcgtgcccaactttaattatttgtcttatttaatttttttaaaaaaaattaaaagcataagtcacgtataaattactattcatattttataacctaataacaacaaaaatattaatctaaaaaaattcaaataagacggatgatctaaattggatacgaaaactcatggctgcgtttattttgggacggagggagtagtgcatatggattgggacacacacatgattatttcgcttcacacgagaaaagagggattcgagagggagggaggggaggagcgatatacctagggctttggagaagaaaggcgcgcgccgccgcaatcgatcgatcccccaccttccgcggagacgccgtcgttggatcttttagggcttccgccgacgacctcgtgcggcaaaattgggggagctcttgattgacgctggcagccaagcagggatataaaaagggacagactacccgcggaccatggcccatgaacccagtcgagcagcctggttgcccttcacttcagcttttaattgggtgttaagttcactttaggtccctcaagttgttgccaagtctgaaattcgtatacaaaagcttccccaacttacaaaaccagtacaaacgatgttccccggtggtatcgtccccaccaccctggttttcgtatcacgtgttattggcatggcgattttgttgtactttaatcctgaaaacaaaataaaaggtgcaaagttgaaaacttaaaaaagaaaataaaatatgcggggcccatatatcatgcaaacaaaaagataaaaaaaagatagtggggcccataatttttatattattttgtgcgccttttcttccatcacactgtttacttttaaattaatcttttaaatgttggcttatttggtcatttttatatacttgcctagatttaatataccgacttgcaagaaaacactaaaaaaatacaacatgatgtaaaaggttttaaaatttaaacttttacatatttttgttatctagattattataagggctgtaatttaggacattatgcctaaaaattcacatttcgcaatgctagtgactcggtcagttcattgttgcaaaatccctgaaaaccttttgaattttaccaagtcccaaacagatttcaatgaacccatctagtactatgttttccatcttgagtttttaagtcgaaaacatttcaagtaattggagctggctgaccaacttacaatttgttgaacgaacagacgaaacatgatgattctccaaccaacaacattcattctaaaccaggcatgtccagtttaaagaaaaaacagagtggactaaaagaccaccaaaatttagatttaacgtaagtataaccccccaagatcccaggattagatttaacacaagtatagcccccaacatccatcccaggacagagactaataacagtagttatgccacgagcaacttcaacatgaagcaaaaacgcagcagaatgaccaggaggtatatgaatcagatgacagtgatcttggctttgtcagataccctcggtagagccagtaacttggtaagagcctgcacatgcacatgcaatcaccatcgtccccgttctcatcatccttgaccttgaatatcttcagttcctctaaaggtgaccagctcagtagcagtccaacaagagcaacctcgcagttagggatgcaagcgggctgacccgcgagttcacttataggtcaaataaatgataattcatgggtttttgcgtcatggtctggtttgtcgcatctagatatataagggcaggagagaggctctcatagcaaatggcttgatgatagggtcaattattcatgttgacttataatgttgcttatccatgataacatttttgacgtgcttacccatgataacttgatttattgcagattgtacactcttacagttaaataataaaggaacgacgcaacgccattgagcacaggaaaaacattcgtgtttttttattcaaccgtccttaattggatagcggacaatgtacaacattctcataaagatggccgggggagtcaaacaaacgttaatcgggctctcgatattgcacaaagtgatttggtaaaagaaaacctacaatttggtattcgatttgagcattatatattttaacaataattttttaggtcattttcccatttgttcaaaacaagcacgggagtctattggtactagataaccttgaatgacagttttatatgttggactctttagtgaacatggcaagctacaaaacatttatacattcagtggtaatcatttcaataccttttgtaaatttgaaagatatcagtccaatattggtaactgtttctttgatttgtgtagattaaagtaatataaaaaaacgatttggatgtggctactagtcaaggtattcggatgccaaaaattcgtgactggaaacccaagcaattccacaaagttccaaaacaaagtgatttgtgagtcctctaatagtataatatacatgctctataatggaccaattattcattttattttgatagatgctcatgcggcctatatgtactaaagtacatcgagctgtttgatgggttaggacttacaaaaaaaactcactcaggtttaacatttaattatacactaagaactttaaatatgtgcctactttatgagtaataaattacatttatgagtgaataatttaaatgtaaatgtaggcatatatttaaagttcttagcgaataatgtaaatgttaaatagtgaataatgtaaatgttaaacctaagcgaatttttttttgagtgaattttttttgtacgtcctgacccatcaaacagctcgatgtactttagtacatataggccgcatgagcatctatcaaaataaaatgaaaaatgaataattgttctgttatagagcatgtatattatactattagatgactcacaaatcactttgtattggaactttgtggaattgcttgggtttccagtcatgaatttttggcatctgaataccttgactagtagccacatccaaatcgttttttattactttaatctacacaaatcaaagcaacagttaccaatattggactgatatctttcaaatttataaaaagatatttaaatgcttaccattgaatgtagaaatgtttagtagcttgccatgttcactaaagagtccaacacataaaactgtcattcaaggttatctagtaccaatatactcctgtgcttgttttgaacaaatgggaaaaggacctaaaaaattattgttaaaatatataatgctcaaattgaataccaaattgtaggttttcttttaccaaatcactctgtgcaatatcaagagctcgattaacgcttgtttgacttccccggccatctttacgagaaggttgtacattgttcgccatccaattaaggacggttggataaaaaaacattgaatgttttttcccgtggtcaatggcgttgcgactataatagtatacaatatgcaataaaccaacttatatgagtaagcacgtcacaaaggttatcatggataataagcaacattataagtcaacattaataattgtatcatcaagccatttggtatgagagcctctccctggattatttgttaaacatatttttatgccattatttcataggccccgctgatattccttgacgagcgagcacatctgcggtgtgccgctggaggcggtcatgatgcagccctcgctggcggaggaaggaattggtgtcatggtggactgttaggggtgggcccgatagcttcagatggactgggctggacatgggctccaaaatctgtggatgaaaatacccctcgctaatgataattaagtgttaatcccgcttttaatctcagccactaatgtgctttgattttcatgcacttttttagaagcatagaagcacatcctatatttcaaaatgctggctctaatactccctccgttttaggctataagttgtttttacttcggtcaaagtcaaactactctaagtttaataaccaagttttatagataaatatagtaatatttacaagatcaaaatagttcaattaataaatctaaaattgaatatgtttttatgataaggttaattttttttctacaacggagtagcatctaagacactcaacttagagaggatggtgacctttatctccggaggtaggtggctcaatttgtctggactcacatctgatgttgattccacctttgcctttttttttatcaggatacattgctttagaaacccgattaaagtgacctagcaattatcgaaaagcttggtcattctacccacatgataacaaggaaaaaaaaaggaagtggagaatcaatacactgaaggctcaagactcaagagcatagatattgtatatgacaagcaatctctgaatctcataaccgtgcagatgaagcagtaataggatctaagttgcatttagctattcatgtgaaatctaggatgcaactaaggaagtacggccatacttattaatgctatgcactactccagtgccaatgccataaagacaacgacttgcttgctagatccacactaactcgtacaacaattttatattatataaaaaaaatcttcgcgctaagagatgaagtcctctctctctctctttttttttttggaaaaacacaatttttattctgttgaaatttagtccaaatcactttggttcgtggagttggaataagttggtgtgccatgaatccaccattctaaaccctagtggatagtcccattacccacaattcctgaaaagaagggagccactagccccgctaatgattgttgcttgcgaggtaatgattgttgccatgagttttcgtgtccaactttaatcgttcgtcttatttaattttttttaaaaaagacttaacataggacctgtttggtacagctccaactcctaaatataactccaggagttgagtctagagtggagttgtggagctgccaaaacccagctccacaactctaatatattttgtgagagagctccacccaactccactcccagttttagtggagctgaaattgtttggctgagctccagctccaagaggggtggagctggaactggagctgtgccaaacaggcccatagtcacatataaagtactattcatattttataatctaataaaaataaaaatattaatcataaaaaaaagaaataaaacagatgatcaaaattggatataaaaactcatgactgtgtttattttgggacagagggagcagtgcatatggagaattgggacacacatgattatttcgcttcgcgcacgagggaagagggattcgggagggagggatgggaggagcgatatacctatggttttggagaagaaaggcgcgcgccgccgcgatcgatcgatcgatccccccaccttccgcggagacggtgtcgttggatcttagggcttccgccgacgacctcgtgcggcaaaattggggcagcttttgattgacgctggcagccgagcagggaaatataaagggacagactacccgcgggccatggcccatgaacccaggcgatcagcttttaattgggcagtaagttcactttgggtccctcaagttgttgcttagtctgattcatatacagcgtttcccccaacttaaaaaaatgcaaacgaggttcctcggcaggacacacaaaaaaaatacaattttattcaaagtatacgaacacacatttgaagtattaaacgtagaataataacaaaacaatttataggttccgactataaactgcgagatgaatttattaagcctaattaatccgtcattagcaaatgtttactgcagcatcacattgtcaatcattgcgtaattaggctcaaaagattcgtctcgcaatttacatgcaaactgtgcaattgggttttttcgtccacatttaatgctccatacatgcgtccaaatatttgatgtgacagaattttcggaagtttgaagttcctttccaaaaaaaattaaagtataaggacacacatttgaagtattaaacgtaactgataacaaaacaaattacagattccgcctgtaaactgcgagacgaatctattaagcctaattaatctatcattagtaaatgtttactgtagcaccacattgtcaaatcagggtgtaattaggctcaaaagattcgtctcgcaatttacatgtaaactgtgcaattggtttttttcatccacatttaatactccatacatgtgtcgaaacatttgatgtgatggaaattttggaagtttgaaagtaactaaacacatcttatgttttaaaccgagtggctcccatagtcccatgtcattatgaacactttggaccgggtagctaattagctaaaaaaattttcccacctattgatatgtgataatttaaagtgaaattttagtaggaattagaaaaaaaaatgcccgtgcgttacaacgggtgaagtctattttaatcttattattattgttgttatatggtttagttaagatgaaattcactgtgggagttcgcttggataatatatttttagaaaataatgagctgtagttacgagtccgattgctcaagttagcatgcgagttttttaaaacagatttcttatatgattccttctgtattaccaaaagtgaacgatcttaaaaactgacttaaatacggatatgtatttccagaagcaaacgaatttaaaaactgactcatacacggttgacgtaccaaaataccagcaaaaacattttcaatttttataatagtaaggataacaaacttaaaaactgacttatacacggatgacgtaccaaaataccggcaaaaacatcttcaatcatgagctgtaattaggagtccaattgctcaagttaacatgcgagttttttaaaacaaatttcttatatgattccttctgtattaccaacagtgaacgacttaaaaaaattcaaagacggatatgtatttacaaaagtaaatgagcttaaaaactgactcattcactgatgacgtatcaaaataccgataaaaacatctttaatttttataatagtagagataaaagatagagatagagatatacaatccattggcccaaagtgctttactcattagaatttgatcgtttggattagaaccaaatctctcgaaattcgtggtttcttaacggatgaatgtcggttgcatcggcatggtcggcgcggaccccaaaaggaaatttaactgcagctcacggtaaaaatcccacgtccaccgtcataggacgcggtaaaaacgcctactagtgcggtaaaaccgcagtaataaaaacgccttccacttccccttcctccacctccctctccggcggcgaccccccgcgcgcgccggccatgtcgatccaccgcaagaagtaccgctacggcatcctcgacgccgacgccgccgatcgccctcccgtccacgcgaagtggtccagcggtatggtgaaggtgaagtacgaatgcgacgacgacgacgacggcgatggcggcggcgacgcgtggcgacgcaaggccctcctctacggcgacgaggtcggcagcgggccctcctccgccgccgccgccccgctggtgcaccgctcgcacggccgggcgtcgtcgcggccgcgcagcggcggcaagcacctccgcgctggccacctctcctcctcgcagtggtcggtgtggggcccggcgtcttccaccaacgccgtcatcaagggggacacctcgtcgtcggccgtagtgggatccaccggccgggtgcttctcgccggcgaagacgtcatcggaaggcggagtacgaagccgaagccgaagccgagtggtggcgtccccgctgccgccgccgccgcagccgccgcctacgtgaccaaggccaagccggtcgctcctccgaaggagaccgcactgcgcacgtacgggcgggacatgacggggtccgccgccgccgccgacccggtgataggccgcgacgacgaggtcgaccgcgtggtgtgcatcctgtgccgccggaccaagaacagcgccgtgctcgtcggcgcgccgggggtcggcaagacggccatcgccgagggccttgcgcgccgcgtcgcggccggggacgtccccgccgcgctcgccggcgcgcgcgtcgtggagctcgacgtcggctccctggtggcgggcacccagtaccgcggcatgttcgaggagcgcgtcaagaaggtgatccaggaggcggagggcgcggcgggcaaggtgatcctcttcatcgacgagatgcacatgctgctcggcgccggcgcgtgcaagggcggcagcatggacggcgccaacctgctcaagccggcgctggcccgtggccgcatccgctgcgtcggcgccaccaccttcgacgagtaccgcaagcacatcgagagggacgccgcgttcgagcgccggttccagaaggtgatcgtcgaggagccgaccacgcaggcgaccattgctattctgcaggggctgaagcagaggtacgaagagcaccatggcttgaagattcaggatgctgccattgtcgctgctgcacagcttgcggaccgctacattaccggtgagaaaatttttcattttgtttaagggaccgaaaaacagtcagatttttcattatactgtaagttacacatatttacacttaacactgtaaatgtctcttgcaatgtaatgtttgcatagtgtgcaaattgcttaactatacttggaagaggagataggagaaaacatgcttatatatacaagagagcgaggtagcaatcaagtaaaaaaaatgtgagaccatatttttagcaaaaccgtttaattagtttattccttgtgctttcatgatactaccggttaagggggattgcacatattctagggttgttgtacatgtcttttgggattacgagttttgttccgggattacattccctgttgtttaagttttgtagggattttaatatcaaattcccattgtcagtatacaattttgttagaagctagtggtatagaacttcacctttttatgaattcggtagcatggacaacactaggaatctcacagtcgggatgccagtatttggccagatgaaaatttggagttgggtcaaattttaacatctgggagaggacttaggtgactcttcatgttagacattcttaaatttgtacaatccatttttttaattggagctaagaattcttatttttaattcatgtatgtgagatgaatcaggccatgaactttcagaaaaaaagaagtcatctcgttgaccctgatttttttttttctaaaacatcatagattactctatactattattagctcacatatcatggcgctgttagtgaaaatgcatttagtcattttatgccttgtactgttgagttctaagttcattacatgtatatttggcttctgagattatccaccaaagagcaactggtaatttgtgggtctatatcactcaatcgttaaagacccttttaattaaaattttccattaccaatccaacatgagggttgattattagtggctgcagtcacctacatttaggaattgcaataaaaagaaagagaagaaaatcgaataaaacgttaattggatatcatggttgtgttctgttccttaactgtatgtaccttcacttgttgacttgatcaactcaactacttttgtaaaggcgactgcaattgacagcataatcattcattccctgctgttctgtgtggtttcttacataagtttacgtaagatctcctgatataatggatcacatgaatttaaagattgatagaattcccgagaatgcttcatgggcaaatatggcacagtgtttctagcgattttcatgcgcatgacagctgagtattaggtaatttgacagatggtatttcttcctgtaggtcgtcaatttcctgacaaggcgattgatctgattgatgaggcttgctccaccgtaaggctgaagattgatagtcaaaaaggggtgaacaccacaggaatgcaaaataacaatggaaatacgtcagtgaatggagtgaacgaagcaattgttggcccagatcatgttgctcaagtaagcatgctacttgtatttgtataataattctgtttcgatcattcattctaatatcctaattatgttcaaatgttatatgaaggttgtgagccgatggactggcatcccggtcactacacttgatcaagaggagaaggagaagttaatccacctggcagacagattgcacgagcgagttgttggccaggatgaagctgtcaaactggttgcacaggcagttttacgttctagggcaggccttgaacaacctggccaacctataggctctttcctctttctgggctcaaccggtgttggaaagacggagcttgcaaaagcccttgctgagcagctatttgacagcgagaagatgttgatccgctttgacatgtctgaatttgttgggagtggatctgtgttgcgtctcattggagcacctccaaggttttgcatacccctgctcccttagtgaaactttacacattccatatttttcattattgacttgttttagtgctttcttggacatcttaaagctatcatggccatcaagatggcggacaattgacagaaaaagttaggacgcgtccttacagtgtcatcctttttgatgaggtggagaaggcagatccctcggtgttcaacgtgttccttcagctcctcgatgatggcatgttgactgatggcaaaggaaggacagtagatttcaagaacaccatcatcattatgacctcaaatctgggagctgagcacctaactgaaggagtgactggtgaaagaacaatggaagctgcacgggaccttgttatgaaacaagtttgttctagtcccgatctatcctgattttgaaatcctggactggctgcagtagcttctttctgattgttatatatactttgcacatgcaggttcagaagtatttcaggcctgaacttctcaacaggctgagtgagattgtgatatttgagccgctttcgcacgacaatcttaaggaggtcgtcaaaattcagatgaagagtgtcgttaccagtgtggctcacaagggcgtatctctacttgcaagtgatgatgccttggacgtcatcttgtctgaatcatacaacccagtaagtgcagattctttacaacatcatcacaagttcgctctaccattttgtaatgaccatgagatctttcagttcgtactaatatagttgaccatgcttccatctctttcagatgtatggggcaagaccagtaaggaggtgggtgcagaagaatgtgatgacaaagctctctgagatgcttattacaggagatgctggacaggggtcaactatttccattgacgctactgatgacaagaaggggctgaactttcaagtattgaaggaggaggtagtggttccgcgaggcaagaggccagtcgaggagcttcaaagcgactcggatagcgatgacgatgtgttcgagatcgcccccataccaaagaggaagaaaggtgattattagcatataggagcagcctgacaagtagctaggttgccacttttgggttatccatattatattagtgaattgcaacatggtagtatctcctttagcttgaacttatgccggttttagccagtgggcgttgtgtctgtgagaactcgcgactcatatggtaaggagggctgcttgcttgcttgcatcggctttcctccatgacgctgtaagagctgaatgagacgacctgatgtccttaatgcatgttacttttaattgctttgtgttcttttcgtggatgaccaggttacaaagaaactactgtaagaacgaattggaaattctctagtttcttgaatagacagggcaatgcttcctagtttctgctggatctgaatggtttcttcgttcttgtgaattcctgcaatgtctttgtgcttttcctcccgattggacaatgtctgctgggagagagaattattcaacatcattttcctgtcctttttttttcccataagtttggaaagttcatcctagttcagtggtctgtatagactgttccattatataacatgtcactgagattattaattatttctactataataatgtgtcatttgggtacggatgcttgtttgaaaatacccataatatcctaatagacgtacacgcattgacaatatgaaagctatataatatcctaatagatttacccgctcaaagttctaaaatttttttttgaaaatatttgtgcagctttgttaacacaggacgttgtgtataagtttcaacattaaatgttcttgttttgtgaaaaaatatttatgtgtggcataggaaagatgacttacatataaaaaaacaacacgaaattattatatgttagtataaaattgataggttttattttataaaaaatcactacatgcagagatcttaaaacatatagaacttttatgtttctcgagggcataaaacatttcagaactactctctcagtcccaaaatataacaatttctagcatttaggaattatttgagattaataatatgcgcgtgctaacactacgacgcaacttgaaataagtgtaaaaagctatatatgttggaaatataaatgttgaaatatctcaaaacacaaatatccaagcaaagatattcattactataatagatttggcttaaaaaataattacatattcttataactttattgctataaacttattgcaatgtaaaattattgttaaattcacaacccccccccccccagcacacacacaagacctaatataattcaaatattggggttttttcttgcaaaaggaagttgtagatttagcctagcaattaaccccacattatgtatgtgccaatcaagatatattagcaaaatatatgaatgtgatatcaatatggtatatttttttcatgttgggctcaacatagtttgttataacgaggagaggttaaagcaaaagaggggaaaaaagtagaactagcaaaagccaaataaattgctcgatgaacaaaactcagcatagtacttcgccttaacataagaaaaaaaaatctaacaagctgtggtttttgccaacagaatcataaattaacaatacaaagaatgcacttaaatatactgtttattcgccgactaatcaagtgaggactagagacaaggtgaatggcacttggcaaaatttaactaaacaaaacccaattgttctagagggtgtaacatttacagagaaaaatagatctagggttaagttctaattcgtgtaggtggagggagacacttctaagatggacctagtctattacaaggcccaaggcccaagttcagtttaagcaacattactagcttgttttgacgattcccattgactcggaatgaatttggatatgagaccggatgcgtttgaaagttagtgagataaactttccatcaagtccaagatcacccaaatcggagttgtcacgaaggcgctaggtctgtttgaagtcaatattgtctctgaaggccgaactggatttcaaaacttattggacttgaatatctcgtagattctccattcatccgacgtattctttggcaatgttttatatttctcatgcttggttgtatgcatatacttgatggtcacatcacttctcctcctccctaaatagaacttgacaacctcgaatcagacaccacgaatatctcccacagcatagcccttacgcccaaatccaacaatcaacacctcgttgataatgatacatgaagaaataagtataggtgacagagcaagcattcaagaaaggtgtaggaatacgaatgttcattttcctcaatgaagttcaggcaaccaaagttcaggaagctattgtgggatggaaatagcagtgtggtggaaatcggtcgtaccgaccaattaatcagccgtatatacgttaacggtagtaaaaccgtcccgttaacgtaacacggtgtacatttatcgttcatgaagtcaaaactctgtttttagcgattagttggtcgtttttccgtttaatcacccgaataatcgtacgctgtatttggtgatgatttagagtagtttattttttacttaatttagaattgtttttgttttgtaacacatatttttgtattttacttatttaacgcagcaattctaccaccatgtgatatataaatccggtattagaagagttaatgttttacttacctgtttaattaaaaaacaacatgaacatattagatttatatagttgtacacatctaaatcttgaactaagtatataatattataaaatttgcacatatattcgcgaatgctaaatttccgtataattccgactaatcgtgcgtattccaatcaaccggtgaacggtaccatttccgtctgacaaccgttttccgtcttccacaacactgaaaaatagtaactgatatcaatatttcagaaatggattgtcatcacttatcatggaatcagttgggcgtactgaattgcaattatgctgctaacatgcttagcaccatgggcaacatgcttaggtgaaccactacctagtaacaagatgccttctggaaggtagcaatcttttgaacaaagccaaatatagaaaatatgtacatcagagttcagatcaatgctgagccttttgaaaatttaataacagtaaaaatgggcttatcatatatctatagtcataaacacaaaattatcgtcatatcttaacccctgaaaatcattgggtgcaatcttataaaaagctaaattgatgttttgtcccctgagattattaattgtttctactataataatgtgtcattggggtatggatgcttgtttgaaaatacccataatatcctaacagacatacaaacattgacaattgatttacccactcaaagttgtaaaaaaaatatgaaaatatttgtgcagctttgttaacacaggacgttgtgtataagtttcagcattaaatgttcttgttttgtgaaaaaatatttatgtgtggcataagaaagatgacttacatattaaaaaaaaacatgaaattattatatgtgataggttttattttataaagaatcactacatgcagagatcttgaaacatatataacttttatgtttctcgagggtagaaaaaatttcagaactactctcaccgtcccaaaatataacaatttctagcatttaagaattattttagaatatcataacttttttgacccaatcacagcattccaccattcaaattgttcatatactttctcttctcaacccttctcccaagctacctattttttttaatatccgtatccaaccttatacattgggacagagttagtattcaaaacttggggtaaccttttattcgaaacttctaacaatttcaactattaatatacccagtatactgttattataactttatattgttccataaacacatcagaataaaaattaacggcgagtatcattttgaggttcataccagtagcaaagatatcacatcactccatggtgactagcaaatgactactgaagcatcatatctcaaaatgaaagtctatccattgtatttgaggaagagcatggaacaatttacaaagacggctcggttacatcattaactcagctcattgctcccgtcaaaccaataactcgagccctgcatgcccttatacctcccaatgtacaaagaattttcaaagaatactcgacagagcacagcaaagcccaccgtttccttgctgatgactagttagttttgaatgcaaaaaatatatcagtgccttaatgagcaccgcagcaggcttcacagcgaaagcagcagcaagatttactcccgttcgactgaagcagggtgctgaaacagcaggctggtaagttagttgacgccaccagcctccacagcagatgtgaatccggaatggtgtcatcctgatctctcgcacggacttggtgtctcgagaagatgcagatattctgatgaagaccacccggctctttacaatttggcaatgagcatttgctgtcatgctttcacttttcactacaaacaccgctccaggaattccagatgtcatcttttcacttctgtaacccctgtgatcctagggtttatgcatgtctgagacctgcatctgtggcccgcccactgcagatggctgctgattgtgtgaacttggcgttctaacgtcttcagataggaagacatccgtatccaggctctcatcccactgcacatctgctgtttccatgttaagtacttcaagttgcaacagtagctacttataagttacaaatgacttctaaacaaaactatgaatagtccaaacaaaagtgtaatgaacgatcataaaggatacgtgctgttttccacatatcagtaatgctgacatccccttctgatatgagccagtaatcagcatcagtctgcaaaatagtgtaaaaaggaccataagtatgatatgatatatttaggtcttttttgacataagaggttctcgggcaaaggacaacttatgacagagcggttatgaacacaataatatataatagtttctacacatgaaggatttgcatgtttgaattgctaaaaaacactagagaagtaaagcaaaagttcaaagatgcatgtaccatgccgtaatgtctagctataactttacaactataaattatgctattctggaaggaaaatcaaaattaaagaggatctgacttacatcaatatctgaagggataatccttgtcattcctccaaaatcatgtgaagcactaggatcctgaggaatcgtctggctgtgctgaatattattgtccacagcaactgagttgctacattgcccaaccccagcatttgttgtattgaagacttcagtaggttgatgttttggtacatttgcatgccctgatggtgttgcacccccacccaagtcctcaaatttctcatcaaattgactaaataaaatggtaaggttttgatcaggtgaaaatcaattcatgtatttaacatcaacagaggaatgcaccattacctaactaagtagacatctattgggcccattgtacttcttaatacgattctatatcttctctggagataatcaccagcctgcatagggagtatattacaagaagctgtgaaccagtttcacgatgccatttattgtcacatacagagtcccttaattttaactgcttcctacctcgtcaggatctgggacttcaagtgtagtgccatgaggagcttttattgcaattagtgtttcattctgcagaatgaaaaaaatatgttacctataatacatgtgttaatcaaatgataatctacaacaaggtggccttgttatggcatgtaagtagaatagaaaacctgaaagcagggtaatcccttgatatcatcttctgtcacatagagccatctatgtaaaaatgaaatagatgctgtacattagtaaacacgatgatgactccctcacactattgatgaaattaaataagaaatacctttgattgttttcatcttcagttaaacctcttagtttttcacgcatatcactgcatagaacacaagctcttcgattaagccatgttcttgttaggttctgtagcatagaaaattgtggtccatgtgaaaccacagacagctactaaccttatgcgctcatctaatgcttgctccttcagactaagattttcaacttctgcctgcagaaagggttgcatatggatttgtgcttagaaatatgcacaggcattcttgtcagaataaaggtattctggtgcacttaagatagtacgccaatttaaactgtacatgaccaaatacctgcaaagctgaaagaccattatctaattccactcctgaatcatccaagcccctgaaatgttgtgtgagattagaatgacaatttaagggttaaagaaataagatcaggtggcaataaaggaagataagggttaaaggaataaaagtgcttacttccaacggattctgttcttgagtgtcttttcaatcaaccctattccttcaagtacattggtaatatcatatatacgccgtttttgaacctgaaaataggaaaatgtgaattgtgtataaagtgagagaaaagagatgtcagatgaaatgatatagtattatagtttataacagtctgtgacctctagtgtttctgcagcattattcaaatctagaatgccatccggagcctgcttcagcaaatttatgaacttctttgtgagaagccctggacatgaattgcaaggacaaatataagtaacaagtaacaacacagtaatatgaaaagccgaaaaggcaagataaattgtaacaaaatacaaaatgtatataagcttcccagactttacttatatatgatagaagttggattgcaatgtctcagactaagacttgaaaaagaaaaaaacaattgtaggcagagagtgacattatcacctaacgaactgtcataacggcatgtaccaacaggagttgggggattaagtggtgaacctgtaaacagaaaatatgcatgtttaattgttcatacgacataacacacagagaaaatgactagaaagaagattacacataccaacatttgatgtaggtgtctgaggcccagctttgttgttcttagtctttgacttggaagtcttaacagctttcccagagactggagtgagcattggactgacagcaaatccagggctagtaatcatacagtcgctagactcagcaacatcactttcttctggtgcttttcttttttgctgtgaagagagaatagcttgtattttatagtcgctaaaagtaatgagaaacatcccaagagggatatgtcgatcattggtaaattcagaacatagaacaaaaatgtatcatcttaagcatatgaccaatgtgggtcctaacaacagaatccatggatgctagacaacatataaagaacaaacaaacaccatattcccatccttactggtttagtgggactgtctcgatgtactccatagatccagttcaacttggaatattaatcatgccaacagttaagaaacattatgaaggtaaacagaaacacctgtggtgttgctactgtagtatatcctgactatctgatgtcagctgtgggatagtagtatatcacaacacaaggatattgtatacaaaatagcttgtaaaatgagatagagcgcccacaactgcagcatgccagtcacgggagcacacgcgattctggcaagattaagtggcctctgttattagcatctgccatacaggtttccgttgcttccctatctggtcaacaaagtcgctgcacagattatttctctttgaaacatttatgatctgacataaaaacttccccttcagttcaagccctgcacggggtgacacgccaacaactgcacggcttgaattctttctttatcgatccacatcacggatctaacatagtcgacacttaacataagaatagttggagctactgagcatttatgcttggctaaacttggaagactttgagggaagccaagaaattgtcagattgaccaaaattcttgcccgaatctacccacggttccaatagctagattagcatctgccgtacgagtttccatctattccgtatgtggtcaacaaagtcatcactatcttcacaacacttatgatttgacataaaaacttccccttgagttcaaaccttggctccgacaactgcatggatcaaattctttccatatcgatctgcgtcgcgtgtctatcatagtcgacatttacttagcataagaatagttggagctactgagcaattatgctttgaccagactaggaagacttagcggaagcttagaaattgaccaaaattccacccaaatctacccagggttctgacggctacactgaaacggacacatgcatacagatagaacgcgcagattttgacccataatcctcaccaggagagctcaaaccaccacagcagcttcgtcagctcccgcgccccaaaaccccccgccctccaaacagaaacggagtaaatcgagaaccgcgcgctcaccggcgtccggatgaccagcccctcctcgatatcgccgccgccgccagcaccgcccgcgccgatgccacccgaaccagacgccgccgccgccgccgcgccaccagcggggaagcggtggtagtcgttgggcgccgcgaagggcgacctcgacgaggcggcgaacggcagcggcgggcgcagcgactgcaggatcttcttctgcgccgccggcggcctcccactccccgccatggcagccctcaccccctcccctccgcccacccgcccagcagcagcagcaacctcccccgatctcgcgatcgccctcctcgacgccgcggtcccccgcaagggacccgatcgaggggcgcggcgtcgggtggagccaggcccggggccggggggtgggaggggctcgccggagctagggttccggccggccggccggcggcgggggcgtggaggtgggtgggtgagggggggaaaggggaatcgaagagagagaggagggaaggggggagaagagagagaaagctagcagaaaacgagggaaggaggagggaaattaggtagtccgcgtcgcgttcggggcggccacctcgttgtggatatggatcaaaatggagaggggaaacgcggcccaatgggccggaggaggtttcactccccgtgggccgggccacttcccttcttcttgttcttcttcttttttttttttacccacgcatttttttaccgtttgtttttttttcgccgcggttaattaatgctgtacgtctgggcggttaattaattaattgggaccaatttttggtgtttctgaattctgataagggtttccagttgggatttttgaaagggctcggaaattggaggagcctctgcagcgcagcacgccatacagagagggaaatggtgatttttattcaatttttggaattggatcccagaaaagcaaatcagtaatgacgttttggagagtggaataaaacaagctggcggtagctacggctaagctggctcacagatcatgtaggcgaggcagaacggatggatatgcacgggcgtggcagagacgaaaggggtaggatattacgaggtgaataatgattgtatttagaaattaattaattgccatactcttttgctctcatcggttgcctgtatccctaacaaaccaaatgacttacttcactagggaatgaaaattattaatttataggtcaaacttttatatatatttatttgtaacgacttaaaagttaccgttaaaaagaaattacgttgaaaacatctaaaaaatcaacttcaaaatcaagcttgaaatttcaaattttagtttttttttttagcttattagaccaaccttttagacttgcaattcaaaagacagctcacaagatgtgtgaatgacacgacagatcaaaaagcaaattgctccctgctgtaggtttcgagaggtaattggaatttcaaatctttgtatttatatctagtctagtccaaatcttatcttttcaattggtgaaaagggtacaaaacttttctgaaaataagggggaaggctacaatcatttttcttttgatagacaagaagataattacaatcttgatgttacaaaaatagacactaaagtcatatcgatagagaggttccatatcttgatacaccacaaaacatatgagtagacgagcgtaaacaaaacgttgatcaactcaggcacatgtaaaacggatgaacaaatagcggccaccatcttcattcttttgatagaacatcaaaccaatatcaacgagcaagtaaaaaaaaaactaagatcccaacatcggtgtcatcgatttgattatcgacgacctgacagacaagccttcccagatcttcatcgataacctctgaataaaataaccaccaacagagagatagaaaaggcaaaagactttaagataagccaaactccataaacatcatggaagacaaactcttgactatctaatagatctaatcatcttaagagaagggtatcctatgatattcttatgtttcttagatcatggtatgcatcccgtaacatctcacacatgattttctttcatactaatgtgaaaaaatggattaaattatacggtaaagaaaacaatacccatgttattccagatccatacagttaatataattaacttactatataatataatggtatgctcttccgtgagaatttcacctcaagaaaagatgatttgctaataaatttataatatgatgtgttgattgacactcttgcttttgttgtgttaatgtggttttcaagttcgatgttgaaaatgcgatgaagttgaagaccatttgattaaagctaattttttgtttagttgttgttgttatttgaacaatttaatatgtttcatgttctcttttatttgaaaaataaataaacaactataagtgtgatcatgtatattaaaacatcagtccattaaatatcatcaagaacgtagtaatgaccaactttcaatggtttctcttttttatctgtgatgacaattgtaaataaaactattatctctctatttgatttgtatgcatgtagtcattcatattaaagagatgattcatgtaatataatcaataatgtagcaatgaccaattaactacataatatcttagaattcactttcaatgatttctcttcttagggttcatggttagggttattttagatgccattattgctagtactaccaaggaaaagtatcaacttcatcaagagacaacgcaaacatgtaagtgttcaagtctagttcaggtcaaacatccttctctttggttacttctttcaaatgacattgatcttactccatttttgtttacatttatctaaatctctacccaattaaaccttgaatttctctttatatattttctctaccaaataggcttgtctcccatgagtacatggatacacgtagtacacatattctagagcaaaatagaaatttgaatagtttaaatcttcatgctcactgcaagtaggagtatatattgcatacctacaagcttcctgacaaaaattcaaaagaattatgcattttactttgaatttataaacataagcgccaacacatggataagattttgcttgagtaggcgaaaatgtgggagcaccttatggtaccttataggtacaatttttgcctacttaatggcatttatttgaagcttattatcattttcccactaaattagttatgctgaatcaccatcggtgtactgacatgtggtgttttataaaatattatacggtaaaatgttacaacttgtatgcatagttttctatagcatgaaggtggatatgatatcaaaagctaatggttacttcaaacagtaaccattagccataaataatattacttgacaatgaaattctgatgcatgaaatatttttgtaagtgaaaaaaaagttaagttatgaggtaatggacgtagttaacttagtgtcagcaactagatatttaaacaatgattataaactgaacaagtaaactggtgtcaaaaccatatgaacaatctaaatgtttgaaagagaaaggtaaaacatctaggatacccaagtgctttccttttatactagttgattttgcaccagcagatttgaagaggataagtagtgctaattacatactctttcaagcttaagagaaatcttaattattggagagaaaaacttattcgataacatatagcataaaaaggtgatacaactaggggtgaaaacggtacgaaaatagacggaaaccacatttattgttttcgttttcatttttttttcggaatcagaaaccccggatacgaaaacggaatcgaatattatcaaaatcgaaaacggagcgaacacgaaccggcgcgaatacggtaacgaaaatttatcggaatacaaaaacccctcaaagcgataaatccaattctcaagtctcaacggtcaataattcatcataaaacacaatcatataattccaattgttaagtctcagcagtacatcacaaaacacaatctatggaataaattatctatgtttattccaatgcatgaaaaaaatattcttacgtaactttatatttgcataacaaatattttttaaaacaataacggacaaacaccatggtatttactattcattgcttaaaaaaggaatccatggtatttcagtcacaaaattttcggaaattccaagaaaatttccataaagtttccgaccgattccgagttccgacggaaactgcccttatcattttcgattccgtttccgggaaaatattttcgaatttgtttccgtttccgcaaaattccaaaaaaattcctaccgacaaattccgttttcgaaaataggtctggaaagttttcgtaccgttttcacccctagatacaaccatgcaggtagaagatgtactaaagaagtgcaactgtaagttgatcgattactattggtagggatatataggagacaaactactacagattagaaaacaataaaaagcatataagtgattcttacacaaaatgcgatggtaggaagaaagttcgatcatgaatgaaaccgaagaatatgaaattagctcttcacgatctagatcgttgatcaagagtgcaagtggatactaccttcgtcctaacatagtagtcatttataggttatttagtaaagattaaggtttagaaaaatgagtataataacctatcagatgtatggttggtatttaggggtagaatatataaaattctgaattggagatgattaatgtgataaaatgtattcgaaaataacaagctttttagacaaattttattcctaaagtgacatctattttgggatggaagagtagtaggacttgcacaattacagcttacatgatgcaacttagagcaagtttaatagtaggctataaccagctataagtttatgtggagaagagagaactagaaaaataaataatgttactctcgtagaaaactaactctttacatacttcaagataaatataataaatatataggtaagagaaagagatagaagaaaagaaagataaaacaatcttataatccatctactatacataactctgaactaatatgggcctgtttggggagcttaagattatgagaatctggaaaagctgagtttcccatcttctgacttatagtttattttctagattctacaactatagcttcttagaatctggaaaaaagctgaactgtttagggaaactttttgttctaagagaagctacatcagctaaaaactcccccaaataggcctagttacttctacagttctactacacctaataagaacatctccaacagaattgacaaattagattatccaaatacccatatagccagctctccaactaatttggataaccaaactagttgctcactccaaaagcctctccatctgcactctctattttaagtctatgacaatgagacccacgtgtcagcctctgttactcgtcttcttctttctcctctttttctccccctcttcctcttttctccctctcttttctccccaacggtagatggcgacagcggcatcgacgggtggtgatgacaagcatggcggcagcgacgggtagcgggccagacgacgctggcgcttgcgcggatggcaggaaagacgacgcagctgtgcggcagctacgcagatactcggtgacgacagcgccgaacgaggcgaacacggcggtggcggatggctgcccagacctcggcgacggaagcctccagacgacggcgctgaggacgaggccatcaatggagacgatggaggtgaggcggccgacgccgaagaggggttcagccccttcttccccatcctcgctcctgcctcgtcgtcaccactgcaccctttgccattgcagccatccttggcggcaagtgagaggccgcggcgacgctcgctagctaatgacctgccacttggcccctttttttcttgttcctcacaaccttggcacggccataggcagatctcacggtgacaaaaatcggcactagaggtcgcggcggtggaaatcgaccctagaggccgaggcgatgctccctgcggcggcactggaggtcgcgacgagcggaaattggtgctgccctgccgccgcaccctcttctctcgcttagagagatgggagaagagtctcaaagatgtaggatccacgattggcaagttagtgtggatggccaagtttggccgatgaaaaaagaaatttggcaacccatttggcttaaccatccgagtagagatgctgttggagtaagatttattttgttaaaattactaaaactagcatggtggcccgcgcatattgcgcggctagtaccgttatattttttttcacttattaacatatatattttcatattttattattaaaatgtattaaaaatggcaacataatttttaaattctatatgaacttaaccaaactaaccaatgtgtagtattcatgttgtattgtatatatgtgatagttataattattttttaattccttattttagttactccctctataccataatataaggcatgatcaaacttgacacggtctttaaaactattttttgtcttataatttctcatatactgtaaggtttgtagtaacaaaattataaccatatgaaagtaaattcaaatatcaatccaatgatataatttctagcaagtaaaattaaatttatattgtactaaatattgatcaaaatgttttgaaggtggaatcttaaaatgcgtggacgccttatattatgagatgtagggagtatttctaaattatattcctatctggactctagagtagtctagactcctcttccaatatttcttattttattttcagtttcaaagttctccaacattccttatttttttaatttcaaatttatgttatttataaattttattattatataaactctaaacccttctttccatattctttattttcaaatcccgaattacaattatttttatatcgattctacactattctttccatattcctcatttttaaattccaaaattcggttatttctaaattgtattcctatatggacactatactcttctttcaatactcctagtttttaattatgactttcaattatttctaaattgtattccaataggtgctctagactcttctctcaatctttttttatcttgaattttagttctttcttaattgtatttctatatgaactctaagatgtactattattttttttaattttgactttcagttagttctaaatttgtatatggactcttgactcttgttttaatattcttttcttaaaaaaaatgaattccacaaaattgtattcctatttggactctagactcttcttccaatattttttatttttaactttgaattttagttatttctttattgtatttctatatggactctaatatgtacttttaattttcttatttttttttattctgaatttttattatttctaatttttatgcctatatggactctagtctcttcttccaatcttgtttatttttagttttgattttttgtaattctaaattatatttctatatggactataaagcctacttttaattttctaatttttttagttctaactttttttagttatttctttattgcattttcacatggactttaacctctatatttaactttttttaattccaaatttcaattatctctaaaatgtatgactatatggactctagtcccctcttccaatattacttattttttaatcttgaatttcagctattttcaaattgtatttctagatagactatattttttcttttctccaattaatacgagaatttataggccgtgagagcgaatgtcgaggctcctgtatttatatgtggactcttttttagttttatttagttttacttatgaatttcacatagtttgaattttattttctaattttcacttgaactctcattttttcttttttctaaaaattgtactcttaatagactctttcaattactatttttcaaaaaaaaaaatctattttctataatttttttgaatcttagttataggtatttataaattatatttatacctatattattttgagacaaattatagaggctagaagttgatatattttggtacggaaggagtattatttagttgtaatccaacttcaaactatttttatacaatactcgtacatgaacaatttttttcataatatttatttttctctccaaattttaggtatttattatcttaatattatctatttttttgcctaaattgtatttctaaaggtacttttatctcaatattaatttttttaaaattttaatccgagtttcggatttttctaaattgtacatctacgtagactcttctctaatttttctttattttttattctgaatttcagatatattgaattgttgaccacgtgtttctgtttggactccttttttttttctctaattattatggattatattatgggagtttctaggaagtgagagctaacatggtggccttttttcctactacattaagataatatagatagatggataaatacatcaggagtctgcacatctgaacccgtcatcagagattcgatttgttgcaacggagagaatagagataaacagttagccaatattggatagtacctgtcacatacatgcacgcttgtgatttgtgctgtacacggttactgtagccaagtttaggtaatttttttcttgcaagagattcttctgcattgtccaatcggacattgcacacataaaacgtgattttttttctaaaaggaaaaggaaagattaggttttccttttttttttttaccgattgtccaattcaagtttcttaatatgtctttttttttctttcttcagtttttaactaatcctaatctagttctatttttcttttttcttatttttttaattaatgtgagaatttttaaaccgtgagagcgaacgtggaggcttgtttttctattactttatagatataatagatttggcttgaagaaactattggagaggctattataaatattccaaaccttgctcttaccgatggggtcgagtgcttggcgcgtgcggcacagatgcggatcgagattggaggcccagaaagtgtggagatcgtgtgccgtgtgcgctgtggtgtgcagcggcggtgccacgtccctatttaaaagcacgatcccacagtggcaggaggcacccaagctcccaaacccctctcgcacccaatccaacccaatcccctcctcatccactccgctctgcggccatggccgcctgctgctcctccctcgccaccgccgtctcctcctcctccgccaagcccctcgccggcatcccccccgccgcgccgcactccctctccctcccccgcgctcccgccgccaggcccctccgcctctccgcctcctcatccagatccgcccgggccagcagcttcgtcgcccgcgccggcggtgtggtgagccccgtcaatctttacctgtatttgattgctctccgttggttcggttctcctgcttgcttacttctgctcttgccgtgttaggacgatgcgccgctggtcgggaacaaggcgcccgacttcgatgcggaggcagtcttcgaccaggagttcatcaacgtatgcgtctcatcggctcatatctcacttctcagatacagaaaatttcctggtagctggtggttgtgtatgctccgagctctgattattgctcctgtggttggttggttgccaccgctcctctgtgattgcaggtgaagctgtccgactacatcgggaagaagtacgtcattctcttcttctacccgttggacttcaccttcgtctgcccgaccggtgagcacggaatgttcgcgttaagggccccaatcgatgctcatcgtgagtgccagtgaagtttgctctggtgcgccgattaatgcattcctgatgtttgcagagattaccgctttcagtgacagatacgatgagttcgagaagttgaacactgagatcctcggtgtttcaattgacagtgtggtatgttgtagcgccctcgtactccatgctttcatcaatactacccaatgtcccgtgcactgcgattgagctcaaataaattttaaacttgaatagttttgtgtaattcctagtagaaaccatatatattttgcaaaaaaaatatcatccacatacataacattattaaaagccacatacgcaaatatctactcgttgtttaaaaggtcccaccaactcaagaggtggtggtagcaaaataaccgtgcattgcaatggatttgaaaaaaaagaattaccataagttgcaatcaaacatcaatccacaaaaagccaagccacattcacaaaaccttagaagatcctgccaactcaagaggtggttctatgtggagttcttttagttttagcatgcacttggccatgcaagtttgattaagctagtacataatagttcataacataaattagtgtctccctctctctatagatagatacatgtggctagatcaatcggttgtatataatattctgcaaattcacatgctatgtgacctttggagcataactactgtccttatgagtgcaattttagcacttccaagttctaaaagaaatctttggaagctttgcatatttggatgctgttttttttcgaggagaaatggtttacagaacatagttgtgggctcagtgtagtcgcatgcaattctttagctaaattcaccattttctgaatatctttttctaactattctcgtattgggagtgatggtgtgactaaaaatatgtggacgatgggatagggtcacacatgctttgttcttcccattaaaatgcatgcctggttaatgtattgattaaccgtaaaatcaattttatagcagcagtttgtccctaagatctttccttttgtatcttattatgacgccttaagtgttacaacatacttatttattctagatcacatggttgtcatgttgtatgacctactttgttagtggagcagagcatttacgtcttactttattgctttgtacagttatgatatgtcaatccctttgatacaaaagacgttccacttttgttccatattcatcacaatacaattatgggggcatatttatcataaaaggcatcttttaaatctcatgctaatacactatagtaaatattatggtcaaagtgacaccttgaaaactacggtaagtaagaattgattcccctctttctgaatcagagggagtatttgatttattttctgtagttccattatagcaataaccttagtggtatttttccatcatttttggtgatctgacatgtgaaataattctttggttgtagttctcccatcttgcatgggtgcagacagacaggaaatctggtgggcttggtgatctgaaatacccattgatttcagatgttactaaatcaatttcgaagtcctttggtgtcttgatccctgaccaggtatccatattccatccaaccatagcattcttgctttagattctttgctatcaactggtgcacttttcaggatctgttagctgcttgttatgttttctaaatctgaacgttaatctttcagggaattgctctgagaggacttttcatcattgacaaggagggagtgattcagcactctaccattaacaaccttgccattggacgcagtgtagatgagaccatgaggacccttcaggtatggcattacatcaaattgctgctttttgagtagggcctctctatgggtctatggcctctaggaaataaaataataaatgactagttgctaattttggaattttagcccagaaacagagcacatttgttgagcacccgtagtgcgtgataaacacgtcattttgcaaagatggttatcttgaagcacaactcatgcaccataaaatggttctggtgcgttttgatgtagagcaaagtagtgctctgtgttttagaaactttatatgcacttcgttagattatgcaaccacctttcaaccagtgaactgaacacctttctttgtacttctatttgctaagatgaacgtctacattgttctacatgtaggcatcgagtctagagtatacattactttctgcacatattgtaagagtactgtagacccatcaaggacccacaatatttacctgacgaacctgaaggaaaaaaaaacaaaggctcagaaaagtgcatctaggatctgcttaggctcatcctgggcatagctcaacatgaagttatcaggctggcttaatcgggccaagctgtcagggcgaccttgtggtttttggggggtggaagttgctaggtgggccaagctgtcagggcgaccttgtggtttttgggggtggaagttgctaggtgggcggtgggccaatcctggtccatcctgcatataggggggaccagttcatgtgtgttttccagtatgggtttcttcagttaacccggtggttcactgatcacaactgttagctgacatgaccacacatttgctgtgcttctactctgcaggcgttgcagtacgtccaggacaacccggacgaggtgtgcccggccggatggaagcccggtgacaagtcgatgaagcctgaccccaagggaagcaaggagtacttcgcggccatctaagcacacatatgcatatgcctggtgatggatgtagggagtttttttgctttcgcgagagccattgcgtttcgtctccaaagtgtagtaccgtgtgctcgtctgatcggattttgttacttgttcgccaccagctgttactttgttccctaacaaataaggctttgttttggtcgtgttatacatgtatacatgttagtgcgtttcaagatcgcttctgttttgggttggattgctcgcacggttttgtttttcattcggtcagactggtttgttcgggacttcgtgttcgagctgcggccacatcttgtgcagatgaagggccgtattggttcagcccgtattaactccggccggaagacatggaagaaaatgggagggaaggcccaagagtaagaagcccatgtcaagttttgtatcttgctcctgattgaattgcctccctcaaccataaaaccgggtattatgcccccctcttcgaaaaccctcgtctttgaaaagcggtgtaaatcggctccacgagcattcttttaagatggttttgccctacatggtgcttaacacatgtatggctaattattttttaaatggtaggggacatttatcgaccacgaggtgtttatgatgtctttgtcaatcttaagatatgttgatccaatctttcaaaagtgtttatagggataagatatgcgtgtgtgttgatatgggagagtatgcgtgcgttgtgaacgaatgcgtttgtactttgtttaagaaaaaagaactaaccaactatgacacatcacaataacaagcatcgcccgcaccaaattcactctgacaaattatcaagccggcatcacagaattaattgatcacaggatcctaaagcaacataaccaattagataatcgatgaaccagcaaacaagccctcgatagggcgggaatttgactatttgccactaattggtttagcaattatccaaatgcccctcttagttttgcatatattgatgtcttaactattcaccacttttgctcacgtggcatgccagcgtggcaacgttctctcctgctctctctccaattccggtgaggggaggggagagctacagctccggcgacaccactttgtggtcgcagaggaggacgagtggaagtagcagccggcggcggcggcggaggaggtgccggcaggaccagtagcggtgcgtagtggctgtgcccgccggtattggcgtcgaaggccgggagcggcaggtggtggtggtggatgatggcggcggcgggtccgcactgtagcggaggcactcgagctccgccacgccaaggtcgcgttgcggcgctacttcgccggtgaggaagcttgctggcgcagcctcggcctcgccatggccgccgcgagctccagagcggcaggtggtggtgctggtggtggtggatgacggcggcggcaccccccatggcggtcatggcggtgttgaggtcgcggagcaagtccgcaccgcagcgaggcgcttgagctccgccacgccaaggccactgcttcgctggtgaggaagcctaccggcgcagcctcggcctcgccatggccgccaaaactccggagcggccgctgtcccatggatggatgacggcggcggtgtcccatggcggccgctgtctcctcagcaccgatgccgatgatgtcgtcctcagagacggtggtggttgggcaagaaggagagaagaaggggagaaaaggaagaggtggctgactagtgggtcacacatccactttctactatactgcgttgccacgctagcatgccacatggataaagtggcaaatagttaagaaagcatcttttaagaaggcaaaaaaaatatatatgcaaacttaagaggggcatttagataattgtcaacctaatagtggtaaatagttaaattcccccttgataaggacgtaacgaaggagtagccgcgtacaaaatgatagatggattccatatacaaacctaataactccattattgaccaaagcggaaaaattttatacgaactaataaatctaaacctctaaaaaattattagaaggataccttaaatacatacttaactaaaacaaaagacgtattccctttctcccccaattcgccagtgataaggacattagagacgcaggaggaaggggacacggcgatgggaagatcctcatgagacaactttgttgcaagtcggcgacatacgtgtaaaaaactttttaatctaaccaattggattttagcaaattttaatttatttgtatgtctataaagtagaggatatagatgtagtacaacttatgcttaaaatttatctgccatcttagaaaacaattgctagttgaaaaaaaagtacttaatccacctcaaaatataacaacttctggtttttacaatttatttttcaaaatataataacttctctaacctacattctcttctcaacaaatcacaacattccaccaaaattttctacttgcatcctaaatcttcttatattttgagacataggtagtacatcattaattttgcatcttttttttaaaaaaaatcattttacatctgcactttataagaaggattaactttttaccttttcttaaaaaaaacatcatatcctgtagtgatcccggcgcccatagatagattaaaaggaggaaagaaaccaattaaccatccatacatgatacatgcatgctgccgtttgaacaagccgacgcgggtcaggaatatttcgatctacctgagatctctcacagctgcaaaaaggcaaaaaagacagtagaagaatagccgattgcacagcaacaaccagacgaagttagcgatgaccggccattctttccaagctaatttctcattgcctccctattcctgtatacattcttcctagctaccaacagtactaacactttactgttcctgatctaacacaacacaacacaaatacacaatccaagcatgcatacatgcgcccaattagcagcaaccactagaacgagcagaagtgataggacacacagaaacacaaacacaaacatgacatctcccatctgcatccatccgcaattctgcacgcatctctgcatattcctgtacatgcgtaactcactgacaaatcaccctgcatgcctgcatgcctgcatgtgcatatgcattcagcttaaggaattgaaggaggaatgatttgacatgcacttttcttttccattgctgctgctctgctagctgcttgaacgtactgttcattctagtgctgcatgctcctctcaccggagtcaggttgggtcaggtcaggccgtaggccacaggtactcgcttcgtgacaattataagagatttttgacacttttaaaaagataaaagattaacaaaataagacaatgatatctctcatcatatataagaagtggttggagaccgaagggtagtttagagtaagacgagaagaaatttgaatagaaggtgatcgatcatcgatagaacaagtagtactctaagtacttatatttgtgaacaaatggagaggatgaaagtcctttatactatttgtgaaggaaagagcatcactaaacattgtgtatagtagtaaaatgtggatgcttttagccggataatgccacataagtgctttttagcgtccttcttccctctgtattacagctttgaaaaggatcggttcctgaaacagatgacagggctggcctagctaattgatagtatttgttttaattagtttaatctgatctctcgacaggctaacctgttgcatgtactgtgctgttccttcctgtgtcatgcatgcatgctttgcttgcaacagataactagttaagcaaagactaattaagggctaaaagaactaaagctggatagagctagagagattagtgccttgcttatatggttttaattactgtcttttgtgttccttttcccctttcatatggtttgtatcctttttcttccccactttgtttctctttgcttttctaatttgccaagcagcttagatgatgctgtgtgtacttttacatgaagagctctccttttgtagttttccctctttgcctttgcagaataccactgcctttgctatcattagggcttgtccttttgctgtcctctgggccccatatggtcacaaaagcttttcttgactgtgacctgggattagcttgaaaagatcatacggtgagaaagatcatcttgcattgtagtaatttatgtatagacagcttactcagaatcctataaagaaagcatatatcaaaaagctcactagagatggttagatgatcatgacaaaattttgctcatacttttgagtctgcatgcaaacattcaaatattctatgttttgcactactgttttttatgttgatgtgtatcatggattgcgcacaaatataatgagaatttatcattgagaaatgaagatagatttcttggaaggtgcaagggcctgacaaaaattgagcaacttatgatcattagtgtttgatcttttagtctttttcccatctctctggtcatatctctacaaagaacaacgttgaagcacgacttttgatatgcaaatgtacgcaattatgacccagtcaatggcgcttaaccgcactttcatgcattgctttggcttttaaccttactgttaattgttcctaccaatctacccagcacatcaatgatctcactaatatatataaacaatgatctccatcaaaagacgaagcagttctccattcatttttcagtactaatagccatggaaatttatgcaaagtaatgaaatgtaattctttgtcaatgaactagaaattgtgacaaccatatatatatatatatatatatatatatatatatatatatatatatatatatatatatatatatatatatatatatatatgtgaatttttatttttccatccctatatatatggcattgtatatatagaatgttggccatataaaagtactatcatatttcgtaaagtatataaattgcttttgagggaacagaaatatagaaagctccaacctttgggcttttttttaattaaacggccatgaatatacagtgttatggcctgtgagagagatgttagttcatgcatggtacgtcacatagaacataaactgaaatcttgcatgcatgcattcattcgtcagtgcatgacatatctacgcagtgcgttcagtgtcgacacttttcctgctgatacctttgaacacagtccagacaggaagaggccgtacgaacacaattcccgattgatatactccatatgcacaaactatgtacatctcgtcttagaaaaaaccaacttgaacatatatttatccagattcgtttctaacagttactccctccgttctattttaaatatagtgattgtgggtttctatgtccaatgtttgatcgtccgttttattttaattttttttatgattagtatttttattgactagatgataaaacataaatagtactttatgcgtgacttacttcttttaattttttttataaattttttaaataagacggatggttaaacgttggtcataacaactcacaactacacttaacatagaataaaaggagtattctttttggatgaagagagtacgcagtagatattacatgcaataacctggcgaaaaaagaaatgacatgcaatatgcgtatacatacatatgcctgcagctgcagatcatcgtcttctcctctcgatcgttattgatccatcgatcgatcagtcgatcgatctgcctgcagaggcagggcccaagttccctctctctcaaaagatgagaggccacatcagatccatcgatcagatcgtcgatcacataaagtatcaaatgttgcatcaccatcattgctacctgctctggggattcccggccgtttccctattgcatgctaattattggtttatgcccatataatactacatacctagtacatatacataatactatatatgtatacgcatgtgtcatgctgatgatctcatgatgtatgcgtgttgctccccttcttgttgcaagaaggaacgagcatttcatttcagcctcgttgtttatcagtcactagtaaaagaagatcagtacgcgtttaaataatttactagctaaaccgtgaatttgtgaagagcattactgaaatataaaggccctatttggtatagctccaagtcctatatccacgctgaatttggagtttctaagttaaattataacggttttaaaatttatatttcaattgaaataggaataaaacgatattcatcacaatattatcaatgtaaattaatagctccagataccatagatttctagagctagctagggatatctagctctaacaaatattgaatcctgagccgtgccaaataaacataagtcgtcgttttagatttgtgcacaaagaagctagtataaggcacgtagcaggtcaaatgaatttgttaccactcatttatactccctccatctacttttgatagtcatattttattttggcacacccaccaaaggataggtaattctacttattatccatttaaacatgctactagccattcctcataaacacgcgattcattaatatttatatttctcgatgcccatgtagccaatcttgtgtggaggaatggagagttacgcattaaatccgagaaggtcattaagagaataggttgttgtattgaaatatgtctatcaaaaataaatttttcagatttaaaaatataactatcaaaaatagatagagaaagtactacataaaagttgagacacatttctttatgaggggtagggcattacttagcaagaactaagatatatttttttggataaataaaagtgcatatatagaaagtctaaagcaacttatatttatgaaagagttgagaaggatgaaatgacctacatttagaatctgaggaagtagttagatatcataattgtgattgtaattatatatgtttatagggtacccatgtttataagatgaaaggagaaggaccaatacttttgctggagttgcatcttgcaagaaaaagctgtggggccttactaaagttagcaatattagacattatccattctccttgctagtactaaccatagctagtagaacaaattaaagctaaggccctgtttagattctccaaaatagcaaaagttttaccattttgttgcaccttttgccattttggatctaaacactagtagcaaaagttggcaatttggcatttggcatttgctagtccatagtagcaaattgtaccaaaaagtgctttgggaccactccctctctctttctctctctcactttagtgctagaatggcaaaactttaacatgcatctaaacaccaactagtacttttgcaatgccaaaacttttgccaccaaaacttttgccatttgccatttgccattccaaatggatctaaacatgccctaactaacatgatgggtccgtttgttatgatcccaaggcaaataaagtgtcagtagaatctctcagatatatgtacaccatgcatgctgtgaattttagtctattgttagctaggagtagttgtggtggaacttggagtcgagtttataaagaaactcattgtgatcataagggctaggagcctttgcctctttgttccatagatgacacgataagacaggtataatttgcctacctttttttttcctaaatcctatgtactaatttaagtgctctccattagtagttaatatgatgcatttttacaattgctctcccaattacctcttttttagcaaatcttacgtcatcttaattacttctagccttgggaagcttgatatacgacgatattatctttctaactctcttcgatcgtggagtcgttttatcgctcaatttttctgcagcaacgtgcgggctttccgtcttgtccactaaccatcttcttcatccatgaataaactgtatgaaaaaaatcaaatcaaattaaaggcactggaaataaaatctttagtaaaaaagcagaagtagctagcaaatggaatctctgctccctggcgcaggcatcccatccctcgtattccccctctacctgcggcaatgcaccctgccagatttggcaaaaaaaaaaatgctcggcaaaaagcacaaatgatccatcaatatatgcacaatctcgcttgcataaaaataatgcagtctatgatcagctctactgcaccaatgatagatcaagtcataatttggagacaccctaaatctttaccagatcaggttctaaattttaggaggttgagtttactcactttgatgcatgcattcacacaaatggtagtatcaaaatgatccctgcagataaggtttttagtactatatatgagttctattctttagatgcagatacatgcaatgcaatgcaggcagctagttctagcttatcacagtcattgcaagtctgctttgcatgcatgcatgacaagaaaacaaacaaacaatctagttacagacactgtgcactagcccatccatatgctaaaccagctagccatctagtactactatagctagtactccaccaatacacctaggtgctctgctatcaaccgaggcccggtttagttaccaaaaatttttgttttagggtgtcgcatcggatatacggatagacatttgaagtattaaacgttgtctaataataaaataaattatatattctgccaaaaactacgagacaaatttattaagcctaattaatccattattaccaaatgtttactgtagcaccacattgtcaaatcatggcacaattaggcttaaaagattcatctcacaatttcccgacgaactgtgtaattgtttttatttttttgtctgcatttaatactccatgcatgtgtccaaatattcgatatgatatggtgaaaatttttgttttgggaactaaacagggcatgaatgatttacttcatccatctcagaaaaaaccaacttctagctaggaatcaaatatagactctatgtttagattcgtcatgagaagttagtttttttttttacaaaagaactgagggagtatcaagacagctacagtagtctagcttgtgtccatccagagagagatggagagaaagctgatgtagctttgtgtagctgctttgtcagcacatgcaatcctcttttccacaccacaaaatcccctttggaccaaagaaagaaaccctcttccctctctgaaaccccaactcagccctcccctgcaagaaaagcacaaacccaaacaccacaagaatccatccatccaacccaacccagtagcagtgttgtaccatctcacactctctctgcaaaaagatgagcactcagctagctagagacacacaccaaacaccatataaagcagcagcagcagaagcagactcccccactaacccatgacccctcatttccatcacctgttcattctttcatctcatctcatcttctctccctatagctagatcaattgcactgttgctattatacctaattaatcacccaatccaagattccaaaacctagctagtgtgatcatcagcttgtgatcgatcctagaaagatcttaagataggttgttgatttgatcatcatcgttggagatgagagctggggggtgcacggtgcagcaggcgctgacggcggaggcggcggctgtggtgaagcaggcggtgagcctggcgcggcggcgcgggaacgcgcaggtgacgccgctgcacgtggcgagcgcgatgctgcaggcggcgggggcggcgccggcgccggggctcctccgcgcggcgtgcctccggtcgcactcccacccgctgcagtgcaaggccctcgagctctgcttcaacgtcgccctcaaccgcctcccggcgtcggcgggggcgtcgccgctgctcggccatggccacggcgtcggcgtctactacccgccgtcgctgtcgaacgcgctcgtcgccgcgttcaagcgcgcccaggcgcaccagcggcggggctccgtcgagacgcagcagcagccggtgctcgccgtcaagatcgagctcgagcagctcgtcatctccatcctcgacgaccccagcgtcagccgcgtcatgcgcgaggccggcttctccagcacccaggtcaaggccaacgtcgagcaagccgtctcttcctccatggaagccgccaccaccaagccccaaaaccctaaccctagcagcagctcgcctccgccggcggctcatcaagaggcgaaacctagtagatgcatcgatcaggtggtggtgcgggaggaggacgtcgcggccatcctggactgcctggcgacgcggagcaagaagcgggtcatggtggtcgccgagtgcgccgccgcggccgaggcggcggcgcgggcggccgtggacaggatcaggcgcggcgaggcgaggcagcacgcgcaggcgcaggtggtcaccctcgccgtgtcccggttccgcggcgcgccgagggaggaggcggagcggcggctggcggagctccggtgcgccgtcaggggcggcggcggccgcgcggtggtgctcgtcgtggaggacctcgcgtgggcggccgagttctgggccgggaggaggccgccgccatcctcctgcggcgcaggcgccggcggctactactactgcgccgtggagcacgccgtcgccgaggtgcgcgccctggcgtgcggcggcggcggcggcggcggcggcgtttggctcgtcgggcacggcacgtaccagacgaacatccggtgccggacggggcacccctcgctggagactctctggggcctccacacgctcgccgtccccgccggcagcctcgccctcagcctcacctgcgccgacgccgacgccgccgccgacgacgacgacaggtaattaattaacctaaccctaatcagttaagcgcggtgatataatccattttaatcaccatggatttgaaacgaaatgccagcgactgttcgaacacagttcgacgatcgatgtactctcatctatttgagatggttgagatggtacaattggcgcctttttcttcttgcctgccacgagtgatgagagctaaagctctcgcatctttccaagcttttcatcagggaatgagctagctaggtcatcagcttcacattatccctttagcttgcatctttgagtatttcctacgtactactactacatctttccttcaacactactatatatatatacattcatgattacaattaaggatctataccacctaactgaaacaattaatcagtgcgtgtgcattgtgtagaactgtaactaccacttcataagttacaacttgtacaagtcaaatttgaacttgcgtgtttgtgaagtgatatattacatacttgttaatttttttattttttttcaaaccatttagttacatacgagaaacgggtgtacgtccacccgagtatttaaaacaggttcccaaaattagatgtgtatagctactcatcagctagcaaagagtacatacctatatatatgcaggcatgatcaatacacatatatgttcatggtggggtagaatcttcagtgcatgacagatgaatcttatcaccatcttatatatatatcctgcatgcgtttgtttgcagtggtgcaatggcagcagcagcagtcaatcaccagtcagccaaaggcgcgaacggatcgacgtcgccgtcgccttgcctgtcacttttggacgctgctgcagcaggtggcgcctgcagctccgggcagctggcggtgatggccgccgccgtctccggcgcctactgcggcggcgattgcgccgccgcgacgaaagcactgctgccacagtcagtcgtcttcatgccgccgtcggcgacgacgaccaccaccaccatccctccatggctgcaccattgccgcgatcaggtaaaaatatatatacccacacaaattcacatttgccaatttgatcgagtgaatttaatttgctgttgtgtgttgaagttttccgtcttttcttatcagcttaggtttttgggttgaattgttcggtacatgtatagtggccactgactaattaggtttttgttgcactcttaattaattaagcaggagcctgcagctcatatgaagaaatggatgtcggcgcatggcggctcgccgtcgcgcaggacggcgctgaacatctcgtccacggcggtgtcgccgtgctcctccgtctcgtcctacgagcagtacacccggttgcaccagccgtaccagccatggctcgtcgccgacgacgacgacgaagccgaagagacgaagcatccatacatcgccggcgatggcggcgctggtaggcttgtgccggcggcggccaaggtggtgatcaagtccgacgactcgagcgcctccaatggctccgtggaggtggagtggcggcggcccaggttcaaggaggtgagcgccgagaacctcaaggtgctctgcggcgcgctggagaaggaggtgccgtggcagaaggtgatcgtgccggagatcgccagcacggtgctccggtgccggtcgggcatggcggcgcccgccatggcgaggaggtcgagctcttgctcgagctccaaggagcacacgtggatgctcttcctcggcggcgacgcggatggcaagttgagggtggcgagggagctggcgagcctcgtcttcggctcgtccaagagcttcgtgtccatcggcggcgccgccaacgcgtcgccgccgccgtcgtcatcgtcgtcgtctccggcgcggtcgtcgggctccaccgagcagccgcaccggagcaagcggccatgggcggagacgacgacgacgacgacgagcgggcgggaccaggaccacctcgaggcgctctacgacgccgtgcgcgacaacccgcggcgcgtcattctgatggagcgcgtcgaccgggccgacgcgcggtgccacgacggcatcagggacgccatcgagcgcggcgtggtgcggagccgcggcggcggcggcgaggaggccttcctcggcgacgccatcgtcgtcctcagctgcgagagcctcaacccaagttcgacgacgccggcgaagaaggccaagacggagtacagcgtggagaagctcgaccaggatggtgatgatcaccatggcaaggaagccgtcgcggcggcggcgtcgccgtcttgctttgatctgaacatgagcatggacgacgacgacgaggcggcggaggagcgttgcaccggcgaagaagaagaagcaggccatcatcatcatcagctgctgctcaaggcagtagacagggtgctgttcttcagatcaattggggaataattgtgatcaatattccaatctttggtgaaattttcttgggggttcttgatcatattaatgctggcgatcgaaattggtcgatgtgtattaattgtttatgttattttgttggttggcatgtttaattattgttagttttcctttatatttgtttttttttgtcgatctttggagatcatgagattggatgcatgggatatatggaactgatctatatatgatggaaatactagctagcttgtaaatttctagctgtggtcaacatatattaaggtattttaatattattattattattattatcttaaggtacttattactcatttatatatggtttggtagtttttctctatctcactgttgtccttcatgtatgtacatattgttttgcctttaggacatgtggcgttatttgttgcatgcaaatatgcaatctagacggtgacaaaaaaattatgaaagtattcgataacaaaaatttcaatatcgtatattaatccacaaaaatatatatgatagatcaaatttgactagctgattcatgcatgataaaaaaaatacaaatcccagcaaggaacataactatatataagtatagttaggtttattttattttctccatgcgaagccaccaacattccaaccatgatgagcaaactctcaaatcgcctacggcgcgccttaattgatcgctagcaatttgtgctaaaatgcctgtcgtgttgtttttcacgagttgacaagaggagggagaaatggaaactagaagactatttatacagcaatgagcgcgaaattcaagttttgtaagagaggcaaaggtaaaatattatcagaaatatggtttttaatttaacaatgttcaaccttttattagtgcagctggtttaaaataagaaccatttataatagtatcacacactacctctgtctcaaaatatatataacatatgaatttggacatatatagaaatgcttatattatgggatggagggtgtacaattttagttatatatgtcacacattgcacatgagttgtgttcagacatcatataccgaatccctatatggctatcacacaacggcgtctagatagtactattaaagacggttaacttttaaccatatctctgaggagcataacgaaattaaatgcagcatttgattacacataaaggaaattgcatgcaccactttgttaattagaatcagataaggttgagtgtgtgctagctaccagacacaccgggccttttgtgcccagctccaaagctatgccggtgatcaacaaatgaaaggtatatagcaccctatccatattcctatcatacaaatttaaatcatgcatgagaaaataattaagaacatatataaaccagctagatgacgtggtacgtactgctgggtacaaaaacacacaagggattcaaaacttagagcttgtgcaaaggaggagtcactttatattagaaggcaaaggaacaatctcccccttaagaaatgtaacaaaagggcacttcttttaatggtagacgaatgtgatttagaaaagggatccctgcttccttttgcttttctttttttttcttttacaattctcttgcctttgctttaggttttcacaagcccaacattctcatgtttggaaagtagtgaggtgtgtgaaaagcttaacatagacacagaaaaaatgaagatataagcatatatgcctcttggaccctaaagtctgttgctttaggatcatttggaaagaaagatcttctatcatttccctccatctgaagatgaaccctaaaattagtctggcaaagaggacagttgtaaattgctaacttgtcgttaatactagcacttttcacttttacacaatattgtactctgtgatttttgcactccttttttcttatgttatttatagacgaaagaaattaatccgtacctggtgaaactttggtgatcatgtaaagaaacataatagtgttgttgcaaatacattactactaactatcagaatccaaaattttgttgttaccaattaattttatggggagctcagcggtttgaaccgcaaatatattagcctaaaccacaaaaaaggttaagctcgacggtgccaaccgacaatgaaaagacgaattgcttggtggttggcgcctccaacaggacttatcgcactcaatgacatgttaccttgagtgtgtaatggatattgaattagtggttcaaagcacccccaaaggtaatgtgtatttttggtggtttcaatcgacaagtattgatttcttgtcatcctggaaagtttgaaatggctatagttttctgtatcgagagcggaccaccaattaagctttccccaatggttaaccgcaaatgaaatggaattaatttcttttgccctctagacttggcgagtattccttgaagattggccaacaaatttgttttcactagcgcggttatcatggtttcttggcaatttgtgcctcttaggaaaaaatgtgatccttgtaaaaaaagttgtaaaaaaattgagtgaataatacatctttgaggaaaattctcgtgcacacaacacaaaggggacgcatgcatgctaattaacctagaaactttaaacgacatccattattttttagaacaaaaccaattggtatatacttatattttttttaaaaaaaaaaggcacagatggcatacttattagaacgagtgtgtttgctttctttgcaaccgtcctagctagctaaccatgcatatgcatgatatagctagcatgggctaacgttgaacagcatctagctccttttatcatcagacatgcatatatatattatgtgccttcaaccgccgtctctggccttctgccccctccaatctgtgatcatgagacaaacctggaatgggactttgatcggcatctctagggattctacatctttttgcgagatggatgatgaattttgcgtcttgattgtaagtagtatatatatagtgtactactactcctgtcctcctgcccttttctcctttttctaaagtgcatgttgcaaacgctttttagcacctcaagagactctcttcaattccctttagtacacttgtggtacatatgctcaatttatacgtggaagttaggaatgggagcaaaagaatgtgaaccgaaaaaccgcactaatttaatattctttcaatatataacacactactggtgccatgttgaaaatataattctccgtaaaaaaatatatggtactttttatttccttagcacaaaattttgaccaccaattgctctgttagaatatttttatgacacaaaattgatgttattagatttatattcaaaagtacggattgcacttttgtatcacataaatgatactcttgtttcatattataagtcgttttgatttttttagtcaaatttatttatgttcactaagttcataaaaaatttagcaatatcaaattagtttaattaaatataatattaaatatattttggtaatgtgtttgttttgtgatgcaaatgttgctatattattgtacaaagttaattagttaaacttaaaaaaatactataaaaaagtcttataatatgaaactgagggaatatattaattagtaaagcaactacttgttggttaattaaagccttgttataacaaaacaaaacatgccttacatttttatatggaggtagtaagagaaaagatgtatagtccatttgttcagatacaccacctcctttctcatatacttatttgaatatatggttttatattcatatacatatacattgaatagactgtcaacatgcaaaacatcaagtaaaaaacaacggatgtagtaacgatattgttttaatttgtgtccctgaatatataattccttcccattcattacatgaatttgtgatcgatcgcctactttgtgattaactaactgatattatacttatatttcatcagttaattagttaagctttatcggtagatcgatatgtttgaacaaagctagctagcaagctaattgtgaatgaaagatatcgaggcgtcatggagagacaaagtttccacagctcagaggcttttgctagagactttcgaggagaaactctctctctcttcttttctcttttgatctgctcctcttttcatgtgtatgtgaggatcatatgaaagaagaagctaaagcatatatgcattgcatatgcacatcagagacgatatgcatggcaatatacatgcatatatacgttctgctctgcacttctgcagcatcaaagtgagggctttgcctagttcttggatctctcgctgcctagtgatcatgacaagcatcttcactgacacctaactgtgctagctatatatatagctagctaggaaccatgatattcacatacaaatgcttgcaaactatagtgtgtatacgtaggcacgtgtatagtaatatagcttttgtatggataatgcatgcatgtaggtgtcaagaaatactccaaccatgaaccacccccatgaatttggttatttctaaatgagccatgaattaagggaataatgaacataccttttctccgtaataaatagaatagacataagaagggtcaaaaaccgctatttcatataaagccatcgatcgagccaacccaaccaaaaactagaactgtgtgcattatatgcatcggaagcaatcgactcggataattattcaatacaacattatgagaacaataccaacgcaaacccatgggaatacttctttagcaaagaaaaatagacacctaattgagctatcatcgatcaagtggtagctatatagagagagtggtcactgatggcatggggatccaaggtacattgttggctttgatttcgacctctttcccatgcatgtagcatcatgagctaccatgatgcgctatacctgcagcagaaagaccaagatagacagcaaaccaccacatactaccctgatggcctgataccctcttcttccaaagcatgtgctctcccttgctcctttctgtctttttggtattcttttttctcctttctttgatgtgctaccttgccagtaaaagaagagcaaattaaaggggaaagggttcatttggtctcatagttaatttggtgtgtgttttggtatagctagctagatgcactgttggactggtcaaaaagaggtgagagagagaagggaaaaaacagtagaagggtagtgttacaggagagagagagaggaaagaatgcaatgtgggagctttttgtttcatgtgagatatggatacgttttgggaggacaaagcacgtagctttatgcatgcatgacaggagagagggttggcaatcccaacacaagcctagagattatattgagggggacccccaaaaaaaggtgggtattttacagcttttatgaaaggccggcttaaggccagtcacaatgggtgtttcatttgagtgtcatgcgcatttaatacagtgacaagtcagcaaaagagcaatatttgcatgaaatgggtaggagagagagtaaactcgtttcaccatggtgacacgagatagcgccgtttcccaggtcactgaaacggggtgaaacagcattgagagttcatcgtttcacctccgggatcccgtgcgagcgctgctcttcgccatcttcgcgcgcatcgccggattcttcccgcgcgagtcccccatcttcccgcgcagcacctccatgttcccgcccccaaagcactggctcgaagcttttttccccaatctcacctgcaaccctagcgccagactcagtccccatcgccccgtccgtcccataccctagcgcaagaaccacgagcggagattgcggagctggatccacaagtaggtggtgaatcctgtccatctgccgccgtccgccgtccagcagccatggatccacaaggaggtggtggatcccgtctgagcgccgccggcagaggagggaataagcgtgggggcaagcagctgggcctgaagaggtcgtcggcgcctgctccatcaccggcaacagctcagccaccgctgcctgcaagttcccctcctgaagctccatcgccggcaacagttcagccgcctactccatcgtcaagtcctgctgttgctgcccccagttcatcccctgctgtaccgatgtcaaccatgcccccatggccaccgcaaggagcaggatggggctctgtaccccccaattttgcttttctgcaaggaaaccaacaaggcccaagttcatggtattttctccttgtcacagattattcattgtacactatgatacatgatatgactctcttcttcatgcattagtaattagttcctgtttatgctcaatgaaatttgttagaatcagtatgtcagtacattggtaatttgatatatgcctgagtaatgaatagaaaaaatgtagtattcagtatggattgcagtaatactttgttagtgaaaattcagtattcagtatgcagtatggattgcggcttgtataacagaaattgaaagcaaaagattcagtttgcaatctggacagtgtactgtacaacatgtaattcacatacgtaaagcttgttaaatatctccttgtcagtacattggtaacaaatgctttgagtgtaaatgccaagggtatcatcctaacattggtatatatttttagccttctgtatggaatgcagacatggtcttctttgcaaccacagcaacagcttgccctacactctgtgctgtcgtcatagctaaccaaataacctgttagtactgatatatatggtcttctttgcaaccacagcaacagcttgccctacatggtcttctgtatgcttgactaaacttgttacttgacatatatgcttgactgaacttgttgcttgactgaattattccttacacatactgtagtacttgcttgactgaactatgtcaggatcttattaaaaaaaatctatgtcagcactgctactatgtcaggatcatcagtatgatgcttaagtaacctgttagtatgtcagtacttactatgtcaggatcatcttctggaacttactatgtttgattttcttatgctgccatcggtttcaattggatttgcttcttatgttttcaggttgtatcctacagaaggcttcgtaaattttctccaacagaactgtctgccgcagccacaagaaggtgaaaattttcaccttgttggtcagactaccaacacaatgtctactccaccaccaacaccccaagctgcagctaacaatacagtccaaattgatattcatgaagatgcaatcaatgatgcaagtgctaaaaagagaagtttgagatattggactcatgatgaggaagagagattggctagtgcttggttgaatgcttctaaagatcccattcatgggaatgaaaagaaaggtgatacgttttggaaagaggttactgatgagttcaacagaaaagggaatgggaagcgtacaagggaaataaatcaattgaaggttcattggtcacgcctcaaatcatcgattggagaattcaatgattactggactaaggtaactcaaatgaatacaagcggatatgacgatgacatgctggagaaggaggcacaacagatgtatgcaaatacatttggaaagccttttgcacttgtgcattggtggaagatactgagaaaagagcccaagtggtgtgcaatgattgagaaggacaaaaacaaggctgaagtggttgatattccagatgaacaaaagcgtcccattggtagagaagcagcacaagccgagcgcaatggaaaacgcaagaaggacagtatgtcagaaggaattgtcatcctaggggacaatattgaaaaaattatcaaagtgacgcaagatcggaagctggagcgtgagaaggtcactgaagcacagattcacatttcaaacgtaaatttgaaggcagcagaacagcaaaaagaagcaaagatgtttgaggtatacaattccctgctcactcaagatacaagtaacatgtctgaagaacagaaggctcgccgagacaaggcattacaaaagctggaggaaaagttatttgctgactaaggttagatatctaatctaatctgagctgcactattatttataataattaaagaatgctgcaatatttagttatattgtctgtatatctgtgctgcactatgcagtcagctgcatatcacgaatttgtcaaatctgagctgcatatctgtgaatggtgcaatatttagttatattaattacccagtgtgaatgatgtattgctgtcagtttcacatatagtatgaatgctgcactatgcagtcagtttcacatgcagtgtgaatgctgcactaggcagtcagtttcacatgcagtgggcgcctatttatgcagagtttagccatctctctactcctctcagaaactcattccctcttttctcatacgaagacctcctcccttttatctttactgtttctctcttcttcaaagatgtctgagcaaaatactgatggaagtcaagttccagtgaacttgttggatgagttcctggctgaggatgagatcatagatgatcttctcactgaagccacggtggtagtacagtccactatagaaggtcttcaaaacgaggcttctgaccatcgacatcatccgaggaagcacatcaagaggccacgagaggaagcacatcagcaactagtgaatgattacttttcagaaaatcctctttacccttccaaaatttttcgtcgaagatttcgtatgtctaggccactttttcttcgcatcgttgaggcattaggccagtggtcagtgtatttcacacaaagggtggatgctgttaatcggaaaggactcagtccactgcaaaagtgtactgcagctattcgccagttggctactggtagtggcgcagatgaactagatgaatatctgaagataggagagactacagcaatggaggcaatgaagaattttgtcaaaggtcttcaagatgtgtttggtgagaggtatcttaggcgccccaccatggaagataccgaacggcttctccaacttggtgagaaacgtggttttcctggaatgttcggcagcattgactgcatgcactggcattgggaaagatgcccagtagcatggaagggtcagttcactcgtggagatcagaaagtgccaaccctgattcttgaggctgtggcatcgcatgatctttggatttggcatgcattttttggagcagcgggttccaacaatgatatcaatgtattgaaccaatctactgtatttatcaaggagctcaaaggacaagctcctagagtccagtacatggtaaatgggaatcaatacaatactgggtattttcttgctgatggaatctaccctgaatgggcagtgtttgttaagtcaatacgactcccaaacactgaaaaggagaaattgtatgcagatatgcaagaaggggcaagaaaagatatcgagagagcctttggtgtattgcagcgaagattttgcatcttaaaacgaccagctcgtctatatgatcgaggtgtactgcgagatgttgttctagcttgcatcatacttcacaatatgatagttgaagatgagaaggaaaccagaattattgaagaagatttagatctaaatgtgcctcctagttcatcaaccgttcaggaacctgagttctctcctgaacagaacacaccatttgatagagttttagaaaaagatatttctatccgagatcgagcggctcataaccgacttaagaaagatttggtggaacacatttggaataagtttggtggtgctgcacatagaactggaaattgagaatcagtaaatgtaattattttatttttcttgtaatttatatatctatggtccacttgtaaatttctgaatgctcatcgccatattttttaatctctgcaggttccaatctatttacaggttccctaaaaaaaaatctatttgcaggttccagtctgttgtcttcacaatgtaagttctgagaatcaaatcactatgtttttctcttttttggtagctacagggtgttagaacatgtgttattttctttactatgcaattgtgatcctccaatatttatctactgcatgtgtaaacctgtttgtcatgtctgaactactttcatttgtacagggtgaaagaatcaatgaaatctatgggtgcatcgtcaatttgcctccagttacctgcttgtcatcgtcatttgtagcttagttctgtcatatttcacctcgagttaacatctattcagttatctaaactttgctatgtagtgaacttggttgaatggtcatttaaatttatcaagtgaacaatcgtacctatctgtgctgaatgcatgtattttgttttgtgttcaagtggctacacacgtttgtgttacatacgatcccactatgtggctggaattaaatgccttgaatttgcattggaaacgctagagtgaaacacagcattgagaaggtctgtttcattgtacgtttcaacttgtttcatcttcgtttcagctgatgtggcgtctgggaaacagtgtaatgaaacactgcattgtgaatggcctaatagtaatactattgcaacttgcttctccaactattgctaagacttcgttgaaggggagctgaattcttgttaattatctcgtttgcatctcatttcttaaatgttaatcagacaattataaaagtagcttaaaatttgaatataacctacacacacacacacacatatatatatatatataaaatacaataggcatgcaccttctttaaaaagttcaaatctaaattcgatctacatcaggagaaacaaaatacaaatttagttataaatagcactaataatattcatagccaaacaggggtgcagccaaaataacctacacatgtagagctgaactaatgggagtttaaatattttcagaaattacatggcatttttcaatattacaatgaagatcatggagctaggcatggggctgccccatgcctgcttcgccccttggccaaacatgtactattcgtaaccaaatctatttttaacttgtttctccaaggattgcaataaatttccacaactcgagtgcatgtgcacttaacagtttgcttctcatttataaatgtcaatcaaatagttagatttatataatacaataggtgtctatcttcttgcctaaatccaagtctaaattcaatcttatagaaacaaaataaaaaaatgttataaatagcaccaacacaattcatagccaaacatgtactacagagtactttttttgtgggatgtgcaataaattgaatttagcatcgcatgttcatggagaggcataacattgtaatatgtgttatacttcttccgtcccaaaataagcacatccatgagttttcgtgtctaattttgatcgtatgtcttatttaaaattttttataactggtatttttattgttattagaatataaacctaaatagtactttatacgtgacatattttttagtttttttaaaaaaattaaataagacggacgattaaagttgaacacagaaactcatggctacgcttattttgggatggagggagtagaactttttttttccaaaagttttcataattatttagataatatgatattgataagtgcacgcgcacttgaactgctaatggactttctcatttgaaggagctgaacatcctaaattcctactatttagtgttcagtactatttaatataattactctttaatttcattctcgtatatataatattgttttagaatacttgtaatcaaaaccaacatctagatcacaatacttaaaataagtttgatatgtgaaaaaagatactccctccgtttcacaatgtaagtcattctaacatttcccacattcatattgatattaatgaatctaggtagatatatatgtctagattcattaacatcaatataaatgtggaaaatgttagaatgacttacattgtgaaacggaggaatagtaataagctgttaaaaaaatacttccgtaaatttgtattcttaattttttatatataaataaatgattaaaaatgtatgggcaaatatatacacaatatagaccatgtcaattttctaaacgatgtaattaagggatgtgtttttttagcaaactactccttcatacacttcaatgctacaaatacatctacactcaaattaatttgttataaaaaaaacctcacgattaatttgttctaaacaaaagtaacacactgctgtgcttggtggagtcaggtggtgtttgggaaggggctagcgggagtcatcgtgatggggctattggcgaagagatgaaaaggatgggcctataggagagaagacagacggtggggacgaagatggctagcagctagagcatcgaaactcgaaaagaggaagaacaaggatccagtgtgaataaaaagagggaataaagaggtctaaaacaaaacttagataaaacttatatggtttattatgtaattcactccttttttttttattcctgaacaaaacacacatgttttcttacatatttatccatagggtttaacctaaatggaaaagaacttaagcgtttcaccggggaaggaaaaagctattgttacccttcaacatgtcatacggtcatatagcctgtttggttgctacctgagcaaaacagcctggcctgagcccaagcctgtaatctgtctaagacgtgtttggttgctaccctgagaattttagcctaaggaatcttgcctgacgaaacttgcctgagtcaggcgtagcaaaaaggccgtctgcttcctcctccactaaaatctggtaccatcagttggagctcagctctatgcgtgagagctactagaaaaaagagagcactttttcagagagcatgttctcagggctttaaccaaccactaccttaaatttaagccatgcctggttaggtaactcttgtaagcaagctcaggctatcctcaagcatgaaaaatactcaggcatcttgctcagggtagcaaccaaacaggcttacctaatatctcaataatgcaagagtgctgtacagcagttgtaacggagaacccattaggaagctagcatcaaatgtgatgcagccggtattgtacctgatgaagtgatgatatcatcgtacggacgtacgagccaccaccaaacatcatcagctccatttgttctttcatgtgcattttttttaattaaccacgattgtgcatatgtatctagttgtatcaaacgtttcaaactatatatatgggcaatgtgactctaaattgtacatgaaaaccatggagaacagacgcctcgaagctagcgatcgagagaacccatgggcacataaaacctttgatttagtataccaggacatggagtaaccctttgatgaaaaacaaacacaacatccagctcttgatagtgttgtatcaagcttagatcgtgctattataggagatgaccaatggggcagaagcaaatgtaaatgtaacgggggaagtggttagcagatttgcgagaacaatatgtgcattttaaaggcccttctaatctctgtccagtatattaccaacattagtatcatttgtcaaagaaagtgacagtataatatggacactatcaaaatgggcagtagtgattctctttaatcgggcaaaataaacacaaagctagcgaatcaatacatcccactcacgtaaacagctcacctacaggaccctttgataacttcgccgcaggattagttgtgatacattcatggttaatcacaagaatattggagccatcactaatgtgattgtagcgagcatcttaataagaacatggatggaaggccccgccgtgtctttaaatggatctccaaccctgcagcataacaaactcctataagtgtatctatcccatatttttggagatattattattcagaaaaacaacaaaatggtcccaagccctgatgacaaacattgtcactccctctgtttctgtcttttagccttctcaactatttcctaaatccatatttccttacttgtttgcccctgcaaagtaaataatacacctatcacaaatacatgactcttcttgagctactttcttaattcttgtgcacaagtttaatatgactaacattcggaatattgctacatatttttgatgaaatgtgtgaacatagtcctagaaacaacccccaaaacagaatttgaaaagtagagcataaaagataaaacacttacgtatcaccagtaactgcagccttgtgagactcactgcctttgccaccaagagcgccagtctcgatgtacttcttagcattatcccaggcaccaccagcagtgttcaagaagagtgccatgagaataccagaaacagttgcaaacataagcatagcggctacaactttggctccaagaagaggccggccagtagcgtgacccaacatacggaagataatacctgcaaaccatgattggtttccccattttcaaaaaaaaaaaagtacccaacgctagaacaaaaatgcaataacccccatatctatagaacttaccaacagccatgggtgatataatggctaaagcccccggccttatcatttccctcaaggaagcagatgccacaattgcaacacaacgaccgtaatcaggcttctcgttgtagtcctgcataacattatattagaagttagcattaacttttataggcataagaaaaatgacaaacttaattatatgcatgtactcaccataatgccaggcctctcaataaactgtctcctgacctcgttaacaacttcttgtgcagttctgccaacagcagaacaagcccatgcactaaacaggaatataagcattgaaccaagtaaaccaccaacaaaaacctctgggattgctatgtcaacctgcaatccattacacaagaccattatatatgttataagcacagaaagtaagtattttgcgtgtctaagtaataaaatacctctttgaatggcaattgtgcgaaagcagctacttcatccatatatgcactgaacaggagaaaggaagccagtgctgctgacccaatagcaaatccctttgtagtagcttttgttgtattgcccacagcatctagaatgtctgtgatttctcttacactttcaggctgcacagtttgctcagttagatggttgggagaacacagagattcaaatatcacatgtaaatacaggctacaactacatgttaaattttatttaatagaagcttcttatggcggaacagtttagagcaatttgaaattgcaaaggaaaatgagtaaagcatattaacagaaacggtaaataaaaacctacagcaaagacaaaatattggtttgaactgctatatacatgggaaaaaatacgagtgtattacctgctgactcatctccacaataccaccagcattgtcagctattggaccaaacatgtccatggtgagaacatatgctgctgtgctaagcatccccattgtagctacagctgtcccaaaaagaccaccagttgggttcccagattcatctactaatccagatgtatgccccaaccaaaatgctgatatgatggctacacttatcactagaactggtaacgctgttgattccagtcccaagcttactccagcaataatattagttccatgccctgtggaacttgaaagagccaaaaggcggacaggctcatgtttgtaatctgtgtaatacttagaaatccaaacaaaagcatatgctgtgatgatgcccaccaagccacacaaggcaaaattgagccatgcagaaggtgcttgttcagtgtacaggagccaccgggtagactgaaaatgtacacaggccaattattataacaaacttcagagaaaaaagaatttgatgtttactgcagaaaaggaagaacaagacaacaccaacataacccagagtaactgcattggggaaatgtttttgtgtttcagttctttgttacataattagttctcttacttccaacactcctgctatgcatgcaatggttatgatcccatggtttagtcagaactttcctgggctagattttttttgttttttcaaaactttatgtttctattctcccccgaaatttaaccatgtaccatcaattttttactttttctgtaattgaatacagtaatagaaagacatttcaacctttcataattcattaaaaaatgatactacctccgtcctaaaatatagcaacttttggccatgtatctggacatacccttatccagaagttgttatatttggggacggaggtagtatttaaagacatgccgatgagaatagtacatgaaagaaattacacaaaccatgccagacacattttgcatcttctgaccctagagaatatctacatccaagcccatggaaacaaatgaagtattctcgccagaacttctactgcactagtactcaaggaagacacagtaaattaatgacaaaaataactagatttaccactccaaaggtaacaacagcgagcagtatagtgatagaatatcctttctgcatgattgccatcggatcttcaataggggatattaacccagagtcacgtgttccccgaattgagagtattccaactgatgagatcaccagatcaaatgaatgaacaacaagaggaaacagtataaagcctgagggatctgcattagcaaagaatgctgattataaagtagaaatattaccaaaaaaaagttattgcagaagaaaagatgaatctcgattttactcaaaaccaggcactgcccatgaataaagatttgttgaaagatcatgttattacataactaaagtattatatatactcatattaacaatatcatttgacggctggctcttcagtgttcttaggctgcgttcgattctgtgttgggaactcattccctccgcacaaaaaatggaacggtccattagcgcgtgattaattaagtattagatttttttttcaaaaatggatcaatatgacttttttaagcaacttttgtataaaaactttttgcaaaaaacgcaccgtttagcagtttgaaaagcgtgcgcgcggaacacgagggggaggggttgagaacactgagcaaagaacacagccttaggagctcacaggaattgtcactggacaatttcgcattcttatcaatgatgttgcatgacaagcaaaagagacttgccttcaattttgcagcgttgtgccattgttcccccgagtatcattgcactgataatttcagctgctatgctctcaaaaaggtcagcccctcgtgcggcacaatctccaacattgtcaccaacctgagtagccctcttttagtatactactgatgtatacatgtgttacagagcataataggataataataataatacaaagtgattttcgagatgcatctctaagttgtgaggggaggtagagggagggatgaggatgtagaacttatcattaccaccagtccaccaccaaactgaaatatttttactgaagagcatgtataagtaacagataaaatataagctagctataaccagacaattcgttctgaataacagatattatatattctatgaagaattatccccagccttgggaaacaatgctagtccatcacctatggaggttttttcttttggagtggggttgggggagttacgtaatgaattgaaaatacaaagaaatattatccttgatagaacttaagaatcatatgacttatgtctaggcatatccaacaagaaaaaatcatatgcttatgatagaaaataataaaaaaatacaacaggcttcaagagaagtatcaataccaagtcagcaatgacagcaggattacgaggatcatcttctggtattccctgctcaacctttcccacaagatcagctccgacatcagcagctttggtgtatattccaccacccaactgagcaaaaagggcgacaaaagacgcaccaaaaccatatcccacaaggagaagaggcactacaggaaataaatgtgaaattgacaaaagaaatattccatttgaataaaagaactaattgcaaacatataaccataaccagtgttatcaaccaggaaaagcacaaatttggccagggccctaaacctgttatcgaccaccgaccacgcttatatatattttttaacagataagaggaccttagctttttgaataagctgttttgtttcctccactttctgttagtcccattgtggtccttcaacttaactaattactcctactttttattgatgttttagaaactgtggttagatttttaaatagcgatgaacttcgtgtcagacagacatttgaaccaggccaacctgtcagtgccatggatagcttctccaggaccaaggatcgatttcacatgatgaaacagctgttacagaagatagcccttacagaccagatgtgaaagttaaaagaaaaaaacagtactccgtctgttcatctttattacctagtactattttttctcatggctgttcataattataggttgcacacctctttcaaggtaactgtatttttgtttctctgagtccctagttgcagctactaaactgtttattgaatggaaaataaattttccaacttccaaagcaatccgtatcagataactggattcatggaaagtatgtgtattgcaattaatatcagaggtttggctcaacatgcatatccttgtggatttgaattgctctttgatcttcaagcccaaatcaagtgagcgtagtctaatataagtgaatggacaaagtacttctcttaagcaggacatgttttgaaaaaagacaggtttaagagaaacttacgatcagtaaccttcattgaaccaggtgaatctacttcaagccaaacatagaatgttgcatacagtattgccacaccaaaaacagccatgccaacaaccacaatggctgagaaaccaccagcgcggacagcaatctgtttagagaaattagtcacaatttgaaattctattgtggagggacaaacacatgaaatgtatagtatatcaagagtataaaacaaaacctgcagtgcttctcttgcagaccgccgagcagcacttgaaactctaacatttgcacgtacggatacccacatcccaacaaaaccagcaatcccagaacataaagctccaaggagaaaggaagcaacagtaatatatgccgatgttgtcctatataaccatgatattcatgagatgtcaaaggatgggcacaaataagatttcagaataagaatgggaaatcaccttccaacaccggatgcctcctgctgtggggtggtggaacgaaagagatagatgccaagaatgacaagtgccaggatacaagccattttagaaatagtcccatattgtgtcctaaaaaatccttcagcaccatctcttatggcatcagatatctgaacatcaagaaggcacccaataaaaaatacagcataaatctgacaggtaaagatgtcaatatactaagtacaactctcaagaacagtaggatgtaggatatataatatcaacatcatgacatccagattcagttcactggtccaaaaaaaattatttatataactgtagttcactagctaacaacatcagcaggtgagcaagaaatagtgtagcattgtacctgtgttgcaccatgcatgccaacaaattcatatcataaagccagtgcacaacagcactagaaacatgtaaaatacgaattcttataccacaactgtttggtcagttaattgataccctgattttgtgggtactggacaagctcctgtggtatgaataaaaattgctctaacatagaaccaatgttcaccttctctataggaaaattgtgtgcattcaggggccacatagatgcctaattactacattacaaatgcatgcacccagatttccttattctatatggtagaaagttggtttgtttagttggctgcctgcattaactcttctatagtaatctccagaaactagtgaatgggcccatattacagtaaattgtgatccgtctgatatgatgccatacgatgatatggcataagtttccaattatattgtactaagcaacatgcaaacatagtacatcagctaaacaccattctgcaacccacaccaacaaaaacaaaatataactaaaaaagaaaagaaaaaataactaaacattaaaaccataaatgtcaagaagaaaaagaaaatatgtccaaaaatctagcatcccttttgaaataacaaaatataactaaacatttaaaccataaatgcaaagctgcaggacaaaagaaaagagcatttacagtctcctaggtggaagtgttaattgaataaagcaaaagatgcataacaccaatagtatattgcatttgcacacaacgaaatagctagttacaaaaaacaaagaaaaacagtatacagcaatgagcatatagaaaatatgaagcatcagtatgtcatcacataattgaacatatgacattgtaatacctcagacatttctggaggaccttcatctttggcaagaacccactttgtgaggtagagagagaagaataaacttagagtacatatgcagaacacaaagagcacaattggtgatgtactggctcctacatagagcacaccactgaataccaaaagaagaagaacaatgaaagcacggggatttatcctcatcaacacacggaagatctgcatcaaacaaaacaagagaatgaagagatgcaaaataagagattaactgttgctgatgccatgttaaataaactctacttataggtaagtaaacaaaaacatttatctgttgatatttgcaacttgcgaaaatattttcatataacaaacatatgtagcttgaaacttcgtagcatatattatgcagatctagattgaaacgtctagagtcaaacatatgaacctgtgggaactaaagttcttgtagtttagaattttcttttaacctcataacaactttaagcaaaattatgcaaaacagtgatagaaatgttgaataatttgagctaataaacatattcttctagtatgagcagagagagctatctttgattactaattacatgtttttcaatagtgaaaagctccaaaagagcgaaatactacaaatgtgtgtaaaacagataggaggtgcaaaattcgcaatgcagcattcggtagtgctatgttgatctttggctctttgccatatatttgcaagaaaaaacaatgtacacaaaagaaatgacacatttcatcaaaatcaaaaaatacatatgtaccataccatcgcactagtacaacatataaggataaaacaatgaacgaaagctaaacccatactcttcctagtcacctacaagaagttaaatctatctaaaaggcggagaaattcataccggtggcagagatgatttagttcgtacggtagagaaagttctgggtctctccggatacaacctcccgttctccatgtccgcttccatcatggctgaataagagttcgccctccttgtcacaggaaaaggagcgatctccccaccctggggcaggtcgcccccggatcccggtcgctgaattttggacggtccctacccagacagctttggagccaagaataccaagtggatccccctttagccctagctccgcaactttcacttctcccttgcaatgccacgagatcagattagtactaaggtttaacacgaggaaggggaaaagaaaaaaaaaacaaacctagcttccagatctagaggaaaggttcgaggcgaactcgaaaggaagagggatgtgcgcgcgtgcggcggcgcgggtgtgctcaccggaggcggaagcagaagggcgacgtgcagcacggccacccaccgccgctcccgtcgcggggatggatggatggaagtcgaggtgcggtggggggcgaggcgaggcgggagagctagcgagcgaggagagacctccgggagtcgaggccgagaagacgagacttggggcccggcgcaaggaggagtaggaggggggagtgtgtgcggcgcggcgccggcaccggcgccgctgctcgtcggcggcggcggcggcggcggcggcggcgatggagatcggcgcggcggcgcaggcaggagacggaacgtggggagatcttcgatcccgcgagcgcaaggaccgatttaacctcgcgtggtttttagcctaacaccatataacacacgagataatagtataatattatccagtggtcactcctgtagaactactactgccgtgcaaaaagcgcaaacggatgtcaagaaagtaaagggaaaaaaaactggaataattagggcaagtttaatagtacagcccactcctatctctaaatcatctatatctaatgtaatagccaattcttacaatagttgtttactatactattaataactggttctacatgtaatacacacattacgttttggagtccgtgctgcagctggctacaaatctgtagcccgctgttattctctctcttcctttatctctttaaaatatgtttataactagcttatagcctgctattgtacctgttcttaactatttgccactcttacgagtggtgctaaattatttgccactggacccacatgtcatagacacataagggcccacatgttatagacggcgagtggcaaataattaattgccacatcgtaaagtggcatagagttaaatgtcaaaaaaaaaaaagctaccgtgcaaactaacccgattgtaccaatttaatttaaaacaagatatcgatggagatgggtcatcagcatacgacctcatcttctcgcttatacttatgcttatgcttatcagccaaaaatttattttttttcaaccttaaatttaaatttgattttatgttttttttcatcgaagtttatttttcaacctttattttggatcgctaagagcacgtatataaaagttttatttacaaattactttttgtttgtaaatatgtcatttgggccggtagtatatccgaacaatttagtcatgtatcgtgcatgcgatgtacgaaatccaccattacacggtacactctcattttattacgtaatattaattactaataacatgaccatataattattgaaattcataattattaatagagtaaatttcacaaaaactatagataaagatatattgaccaaactatcgcaaaactcgcaaagtaataatttggttaaaatatatgtacttttattaataccagttcagttttgtaccatagtgcatataatcaaaatttcacccattctttcccttttttacatcttgttatttgttttttcaccattctccatcttcgataacaataacataagcttcatttgccaactccttgcaattaagttctattggctatgtgtgtgttggagctctctagttattagaattaatatatattattttggctttttaatattattttatcttttttttgtcaggccgatggaatatcgacttaactatattatggaaagaaatgcacaaataataatacaaagattaacaacaaacatggttgttgcacttgactctatggctttacaccatggttacacaaggagaaaggggaactatagggcagagcctgaactcttacacacagtcgagtagcagtagatagttctagtacaatctctaagtccaccattcttccatgattacctgagctactttgcaacgccgctttgcatagaccctgagtgtggcaccatctccacaccatccatgatattaggataagtgttgcataaaatgcatgatgactggcttcgggatgcttcggtgagcctcaaaccactaggatgctaagtcatccgagtcaggatgcaaggcgatcttcattttctagcgaacattgtcccatacctgcctggtgtagcaacatatgaagaaagggtggttgcggatctcagctaccacgccgcatagcagacatgttgtcatcgagcatggtatgtgccgacgcatgagattgccagctgttaggcaacttcctcggaacgccaagaagaagaagaagtacttgcacctggacgatactttggctttctaaagaatacagacagagattttgtcataccttcaaagaatatgtcgtacaatgaaacactgtaatagaggcctcacttgagaacttctagattatctcatcttgtgcaccggtgtgtagcttgccctaggtgacaatttcccaatgtgcaagtattctaagatagcccgggggacagacttccacagatgtcccgcacccatcaattttatcttgcaacgccgtggccaccttgcaacgacgatatttgacaaaggatcagtccaaaacgttgtcttggatccatcccttaccactactatggtggtaatcgtgaaacagggaattgagagcggagtcctttgccagatgaagcgctacccatggccaatctggttgggtttattggtgccatggccagcaaagctgcagtgccacacctagtagtatgatgtttttcatgcatagccctccgacctccttatgcatacagatctatcccatgccacaaggcaatttcccccattgatctcttcttcccctttccatcgaaaagcacaacactagcacttgattagatcaattgcccgttgggggcaactcgaatacggtcataaggtagaccggtaggaccatcaagcgcgtgtcgatgagaaactaggcggtgcacaggaaaccaaaaggattcggtttctagcctaccatcttcttggagtaccggccaaagagggggtaggagctctactttgcttggatgctgcgtcgagagcgggaggccaaggtaagttatagggaggttcttcacagcacattgcaatagatcagccaccaattggacttgctcctctgaacatgcaataggggagagaattctgttactccctccaagctgataatacttatcgttttagacaaggtgaggtcaaactttataatctttgattatgaatcatttttaaaatatttgtctttcaaatatggtgactacatgtatagattagttttaaaaagtaatttgataaaaacatatatttgttaacacttttatacatattacaatgaaaaataatggtcaaagttattttctagagaccatgctattatccaaaacaaaacgacaagtattatcagcccggagagagtaactactatcaagcttataatattgtcttttgggacattacaaattattttcttcaagtttttttaagttttttttatttttttttctccgctgcaacgcgtgggtaaccactagtttcctaatgaattcgttcctacgtgcgaattcaaagccaggccccaggcaagcatctctacctttgaaaatagttatgacctggtggaaatagtatatgagcctccctaatgtacaaaaaaagaatactggacatttgttatattgcaaaacacggcgatggcgattatgcacaaaattatttgatctgctcttccagacctcagttgctaacttcttctagagcacagctgctatatcgtgtatgtgcacaagatctaatactctacaatatcaactgctctttagcatatttaaatgttcatagtgaagaagatttgttcgcaatagcaagttggattctgcgaaagaattcatccacaggcatagtaccaatctccccactatgcctggacctgatagtgagggtcctggcttgaacttctttaggcccaacgaccgccatgagcggcactttcttcgtttcggcattccgtattagctttggtagacgctcgccatgacatacctcagctcgaatgccttttgatttcagttctgaagccacctcgttacagtattgcagctgcaaatgtgaaacaagatgcagctggtttacatcaaatacctggaaatatctcctgaatggagccaaaagtaaaagtacaaaaaagatgctaggttgaagtcttaaacagatttaatctacactaataaaatcaaccaggatccacagatgcaaaagaacactgatgtcctgacttcggttgttcagataaatgatgctgttacgaactgaagttgggtgcttttaatttaatagcacatgtagtcatgcatctagatgatcaaagtaaatgaagcaaacctcattgtctgtcacaggtagaatacgagcttggattggtgcaagccaaagtggaaaatcaccagcatagtgttcaatgaggacaccaaaaaatcgttccaaagacccaaggatagctctatgaatcatgataggccgtttcttctcgctatttgaattgacataagtaatgtcaaaccgctcaggtaaattgaaatcgacctgtaatgtagtaaactgttaacgtggtccattgtgctcaaagattttcgataaatatacaactgacctgcacagtggaacattgccattttcttccaagagcatcctcaattttcaaatcaatttttgggccatagaaagcgcctccaccttcatcaaccttgtactcccaacctttgtcttctagtgcatcttttagtgcaagtgttgctttttcccatatgtcatcactgccaacagatttttctggccttgttgaaaggtttatctcataataccgaaagccaaattggcccagtatttgctcagtcagatcaagaacacctctaatttcatcttttatctggtcctccagacaaaatatgtgggcatcatcctgcacaaatagacctattttataacaataacaagaaaggttatgaaatcaaaaggtagtacttcctccgtttcaggttataagactttctagtattgtccacattcatatagatgttagcatattcattaacatctatatgaatgtggacaatgctagaaagtcttataacctgaaacggaggtagtagtagtacttaatgaaatctgttagtacaatacataggaaaactcactagaaaaacatgccataatgacacaaatcacaatgtacaatatatatttgaattcagtgactgcagaatgcatagaaccagcatgattccatcagaaagaaaatagaagcagaattctgaagtagagaggcacctgcgtaaatcctctgacacggaacagcccatgcaaactaccagatagctcatatctgtagacagttccaagctctgccactcgaatgggaaaatccctgtatgaatgtagctttctcttgtatactaaaatgtggtaagggcaattcatgggccgaagttgatatagctcatcttcaacatccatttgattgtacatgttctctttgtagaaatcgatatgcccactaaccttccaaagttcagcctttgcaacgtggggagtgtataatagatcataaccacgttgcaagtgaatctgtttccatgagtcttctaaaacatgtctgataatagcaccttttggatgccagaatactaaaccgccaccagcatcttcctgttaaaaattcatattctacagttactataaataaaaagtaaaaaaaaaagttggatatgcatgtaatcaggcctgaattaaagtggcatagggttgtaaagctaagccaatggaacatggatgatactgtgccataattggtggtctatagcaaatacgtgtgaagcatcagcagatgttggtggtagcagactaacagcaaaatgaagttctatgatttgaatgaaggtgccactttaagtttttaacagtcatatctggtagtgtaacaaactaacaactaacaaggcattctaatacttgggagtcaactccattactttgagatgctatatcaaaatatggctattgcattaaagaagaaaggactgactgacttgcacactctaaccatacaaagaggctatggcacactgtaatgctaaaattatataaccaatatcatggagggggaaaaagatcaacaagataatatatgttggatatgaaggttgagacttgccgttactaacaaattaccgccatatggttctcgagttaattagttgcagaattaagattatacctgtatggagaatagatcaagatccagacctaatcgccgatgatcacggcgcttggcctcttccttgaagtggatgtaagccttcaattggtcttcagtctcccatgcagtcccgtatattctttgtagcatttgattactttcgtcacctctccagtaagcaccagcaacagactcaagctcaacagctcttctatcgattttgccagtagactcgacatgaggtccggcacagagatcccaccactcttctcctacagtatacagtgaattcaccaacatgagcatagactccaccgatcaaccaaaaaaaaaatgcatgacgaaaatgtaatgctcaaaatcaaacgagatggcactacaaaccaatgtgatagattgtgataggatcttccttgatgccctccaaaatttccaacttatatggctcattaagcgcttcaatcctcttttgggcctcttccctggacacctcctccctcaccaatgggagattcttccggatgatccgatcctaccaccaccatagcatgttaagcaactcaaaaattcaccccaacaatttagttcgttcgttcagagaattacaaaaaaggaacacatcaatcaattcggttacatacataccatctctttcttgatcctcttgaggtccttgtccgtgaggggctccatgtcgaagtcgtagtagaagccgttgtctatccagggacctattgtcaccttggagttggggaacagcttctggacggccatggccatcacatgcgcacactagagcagcaagcaaaggatgacgcgaatcaaccaacgacatagcagcataattggttagcgaaatcaacacgaaattggaataaaccagattaatgacaggtagagaagtgaggaatgggaggcagcaaaaagcaagtacggtgtggcggatgcggagcaggcggtcggaggactcgttggtggggagcacgacgcgctcctcctccccaatcccatcccccttgccgtcggatcccgcctgggcggaagccgcatccgtggcctcggccgccgccgccgacggcgccgagggcgaggcggtggagcgcgcggcggtggtggtgctgcgcgggaggccgaacgagacggagctgagcccacgcgagaagccggctgggtagcggcgcggcgaggaggagtggcggaggaggcagcggtggtggtggtggaaccggagaaggggcgcggagacggcggccgccattgtggcgcgcgccgggagcggtgggcgcgtggtggccgctgctgttggatatcgtttttggtctctctgcttcgagcctctctagcgtacagatgtgtactgtactactacggggctaatactccttccatcccaaaatgttccgcttacttttttaaacatatttaatctttcatcttatttaaaaaatttaagtaattattaattttttcctatcatttgatttattgataaatttacttatgtatacatataattttacatatttcacaaaagtttttgaataagacgaacggtcagacatgtttaaaaaagtcaacggagtcaaacatttagggagggagtacctctgtatattaaatatacaatttaatactccttctatttccatttacaataattccattttatatggtaaggcatttgattttttttatagttaaattttgttaagtttgatcaagtttatagaaaaaattagcaagatataaaatactccctccatcccacaagacgccgttgacttttttaaaaatatttgaccgttcgtcttatttaaaaaatttaagtaattattaattctttttctatcatttgatttattgttaaatatacttttatgtatacatatagatttacatatttcacaaaagtttttgaataagacgaacggtcaaaaatgttttaaaaaggtcaacggtgtcaaacatttagggaaggaggaaatattaaattagttttattaaacatatatttgttttgtgttgaaaatactattatatttttcaataaatttggttaaactaaaaaaaagtatatgaaatggagcgagtatgcaatattgttaatattttttgtttttctataaaactttgatcactaccacctctattccaatataagtgtacttgtgggtttcgtgtccaacgcttgatcgtccgtcttatttaaaaaaatatgattagaatttttattgttattagatgataaaacatgaatagtactttatatgtgacttttttttataaaatttttaaataagacggacagtcaaatattggacatgaaaacccacaactgcacttatattgggacggaggtagtactacttttctactccctctacttcatattataagccattttgatttttttttctgtcgacgagggatacttgcggatcggatgagttaagtattggggtacgttggaacgagagtctacgtagtacgacatcaagcaaacagaagacaaggattatactagttcaggccccttatcaggtaatagctctagtccagtttatatgagattgatgacgatgagaacagattacaaagagagtagtcgaaacagatagtaccgacgagatcgtagtcgagagattcgacgagatctctcggcgaattggctccgtgcactccggcttcgtaaactttggtggatgtgtggacggtgagatgcgatagccttcacctccccctaagggtcccttttataccgtggaataccttgacccccaagtaataccgtagaataccttgacccccaagtaagtcttagggatatgtaaactggcacgatataacaaagactttacccccttctgagttggactccggcaatttcttaactcatagagatattttccataatttgagatagattcctaacggcgtatacggaaacgatacgtacacgtgaaggtataccttattggtatatttcataagtcgtaggataaatggtatgccttatccgtaaccctgacattttcctaggtaaattttttaagtttgctcaaattttatagaaaaatttagtatcatccaaaacaccatattagtttaagagtaaattgcatcaccagtacatgaacttgtcatgtgggtgcaatctagtgcacaaacttgtaaaatgctcgttttggtgcatgaacttatctggtgcatgcgaatgaaggcgaaaaggacattacatggctaatcttattgattttggtactaattaggatactatataaacatatatctgagaagattgcaattagatatacacattttcaataaaaaatagaatatgatatagtgatagggtgtgtttagttcacgtcaaaaatgaaagtttgattgaaattggaatgatgtgatggaaaagttggaagtttgtatgtgcaggaaagtttggatgtaatggaaaagttggaagtttgtatgtgcaggaaagtttggatgtaatggaaaagttggaagtttgaagaaaaacttgggaactaaaccaggccacagtagaaaaagattaaaagaaaaaccgagcaatgatattttggtcctcgttcgcacgaactagacaagtttgtgtactgaaacagacattttacaagtttatgtactaaattgcacccacctaacaagtttgtgtaccaccaatgtaatttactcttagtttaattaaatctaacattgcaaatgttttgataatatagttgttttgtgttataaatagtactccctccgtcccagaatataagcctttttagagttggacacagttattaagaaaattggtatgattaaatgagggagtgttgtgattggaggagaagtggagttaagtgggaaaattgaatgacggaaggttgtgattggttaagaataaaatgttagtagagaagttgttatattttgggatagattctgaaagctagaagttgctatattttgggatgaagggaatactttttttaataaatttgattaaacttaagaagtttaattaaaaaaagtcaaagcaacttataatatgaacataagaagtattatatacaacaacaatatctaacaaagttataatattgtaaaaatatttataaataaaacctacacatatggttttatgctttcgaactgaacatttagagagcttattgatggtcaactttgaagaaaaaaaatcagttgtgctatatacacacacatatacacagaaggagtgcttgacatgctaagattcaaatatggaattccttctgttgaagagagttcggacaaaaattacagcccaagtactttagctgtaaaaataggcaaaaatagggagtgcagatttgaaacccctatagtcatatatgcccccctatgtttcgaagtagttgtcattttaaagtatgtgcaatccagtggcggatctagaaaattggttcgttggtgtcacaacgtgtctatcggtgtcatagtatgttaattatgcttagagcataatgttataatatatgaagctgttttgctataggttttgccgaaagtcgtcggtgtcggctgacaccgacgattatactatagatccgcccctgctgcaatcaaaggttgaaaaataggtggagggggagctaatttcttccttttcataatggaaatgttttgaatccaggcctttaccgacgcacagttatagattttgtggttgaaaggaaaaaaaaagcatagtagcgtgatatgacaaatccctgactccttaaaaaaaatgatcagctgcactaaatctacaaagaaaaatcacacaattataagaaatgacgagtcatggaactgcgacgactttgcatggatcatgtcgtgggcttgggcttgggctgcggctgggtggtttgccctctcgttttgagttgaagcggacagcattacgtgggcttcgaggttgggctgggccgctggggttgggagttagatgatctgcgctgcgctccccttgcccttgctgtcttgctctctctcgccaacctcgccggagtcgcccgcagcagcagcagcagcagcgccgcctcctcctcccttccggacccctcgcttcgcttcgcctcgcctcgcctcgcctgcttccaagcgagcgaaaccacaccgctctggcgctccctccttccctgtagcgcccgttccgtcgtggcgcctagcgggaaaattatctcttaaaaaccctagttgcgaaatttgtttctttgcttgttgtctagtgtccgtgccatctcaagatctcaaatccccgatctatcgtcgagttcaattccgaatccaaatccttccaaatcaaattcctccgcaaaagtctattttgcctcccccagggtcgatgggccgaatttctctcggcccatctcccccttcctcccggctatctctctctctctctccctccccctccgctccgcccgcgcgccgcgcgcgcgtgcgcgtgagccgccgagccgagccctcctcttcgctccctcgctgccgctccccgcgcgtcgttcgcgcgtgggcccgcgtggtcgtcgcccgcgtcgcgcctgcgccgtctgcgccgcctggccccgctgctctgcggcgcctgcagccgctcggccccacagccagcgcgcgtgcccgagccgcgccgctcaatccgccgcgcctcccgttgcatcccgcgcgagcgtgccgtggtggccgaccgcctggtcaccgccgccgtcaccctctgccgcgccagcccgcgcctgtcgcccttgtcgccgctccgctccaaaccgtcccgccgtcatcgccgtcgtcatcgcctcggccccgccactccgcgcgcaagccgccaagggacggaggcagagcccctcctccctctgccgcgacgccccgctcccctcctccttttcccaaagcggcaaggaggcaaacccctttctctccctccttttcccctttttctcccgccggcgtcatcctccctccgtcctgtcgccgatttggccgcgagcgccgagcgccagctcgcgccttgaccgcccaaagtcggtttccaaaccgacattgccgcccttaaagccccaggcgccctcccttcctctttccctcccccaatcctccccgtttctcgtccgcgccattgccgccgcctcccgtgctctgtctcgcctccgccgttcatcgccgagcgccgggagagccggtgtgttcgaggacgcggaaggggactccgggcgctcgtcttcttcctcttccccggcccgaggccggagagattactcccgcgccgtcggcctctcgtcactgcgccccgcccgcacggtagtgcctccctccgttcttcctcctcgctccatctccccccttagttttcggtggtagcacgagtagcctccccgtagctagacggcgccgcctcgaccgttgccgtcgctcgccgtgtctcgccgccatcgctgcccgagctccgtagcacccgctcgtcgccggcctcgctcggcgtagctccgcccaatccgacgctagcatcggattcccgtagccgcgtagatgctctcgccgccgggaattggcccctcgtgacctcgtcgccgtttcccccttttccctccgccgggcgccgccgccgcaatccgccgccgacggactccctccggcgaatccaagccgttggctcgctccctctcattctccctcgtcatcccggtgtacgccccgtcgcccctcatcgtcgcaaggcgtcccggagaaaccgccgccgcccgccgtccattcgcggccggcgccttcgtcttcctcccgccagcccgcgtggtagccacgtaggcgccacgtcggcgccagctcggccgggtcgagccgaccccggtcagcccctccctgtgcgcgcgttccaaagcgagccgtgaggctgcgcgtgggcccgccgcatccgcatccaccgcgaatcgtgcgcgtgcaccgcgtccctcccccgcccgcgcgcgtgcgccgcgtgctcgctccgcacggtgaaccgtgtcaccgacaagcgggtgccacccgggaccacgcgtggtgagcccggttcaccggctctctctctcctccctcccgcgcgtgcgcgccttgggccgccttgggccggccggcccatttagctcggccggaccgctccatttctctcgggccgcgccctagccgcctgagaaaagtctattttccctctctctcttttcttttcttttcttttcttttctaaaaaggatttaattaaatccttttcctttagaccaaaaatccaataatcttagaaattcaatatccttccaaccgttagtccgtttgactccgttcaacttccaaaattcctcaaatctcgagatctatctaatggcacgcttagaggtcattaatagggctttattttcgccgtttgttgagttgtcccgtttcgcgtgtagtttcggagcccgaagacccgcagtgcgaggatttcgaggatcaagctccagatctcgagcaaggcaagccacctttgaacatcttgagcctatatttgaaatttaattatgttgcttgaaaaatattatgcattgataggatcgcacttaatctgttgtcccgtctgcaaggcagatcagtggacctacctaatttgttgcatttgatccttcctttgctaattgatataccatgtccccttgtaaccatctagttgcgtctcgatattcgtgcaccctgtgcgagtatcgacggacgccttcaaacttaaaattctaagtaacttcttgggtaaaacttgggttttacaaaagacttggaaaacccgacacctgggtcggtgcttgcgaactaaatgaatttccaaaaccgcggaccagggaacgtaccgggtgtacggttttccgctcttgcacttaaggaccgtttccttggaatttcatccaaacatatgacaagtacgaccacatgggtggaatgggacacccctggctgagtaactagcttatcaggggagccttgatgccgagagacatgtggattcgccggggtggtgtcggggaggacccctgggcttcctggcacagtatggtctgggacctaacctgttgttggtctgggacccctctcgtcggcatatggtaaacctgtgtcggctttggaaataccttgtcatgaaagcttggaggtctcccgacgtggctgatccctacgggctgggtgatccgggttagtaatgtcgtgtgggtaaagtgtaccccctctgcagaggttatcaaactgttcgaacagccctgcccacggtcatgggcggatgtgaggtgattcctagcgtagttttgtttgactactgcttgtgaaattgctgttgtggaaaggggttcgatgattgaaaaatctgtagctgatggaatcagctaggcccgggtggccgtttgaaagttgttggcccgggtggccgtttgaaaagctgttggccgggtgccaaccttgattaaaatctaaagactgatacattgcacatactccgaccggacgagacgcactgtctcatccgtgtcgtttgagaagcactcacttagttgatttcagaaaagagttcaaatgaaatcaattgcaaaaacaacagcctttccttgaagcctgcaataaacacctatttcccatggcttgctgtgtactcctgtactcacccttgctctatataaataatcccccccagttgctgaagaagatgaagcggatcccgctgacaaggagttcttccaggagcaagccggctacgatgagttttaggttttcggcctagttcccaagtcgcgcctgtgttgtttggtccaagtcctggtttccgtttcccttttgtaatgcagttgtgagctcgggatctgtccgcagcccaacatgactgtacctctactctataataaagagacctctgttgctgtgataatctgtcttcctgtgataccagcactgtttcctgggactggtatcgatttacaggttaatttggagcgtcacgggctagttctggtcggtactagttcggggcgtgacattccctccccaagcactcacctccgcttctccccgcccaaccagtcgagtcgagtccaccaccgccatcgccgctgtcgccgccgccgcactgaacacgatggcaaaagcggaggggaaggcagcgcatggcgccctatacgccatttcggcttcagcgtcttacgcagaggatcacggtcgagtcgagtctgccaccgccaccgccacctccacctccaccgctgccgccaccgccaccgccgccgaactgagcacgatggaaacagcggagggggaggtagcgcatggcgccctagacgccgctgccgcttcagcgtctgacgcaggggatcctagtcgagtcgagtccgccaccgccactgtcaggaaccaaacgattttggttcagacaaatttggggaaaaattcagatatggcaaatagctaactaatgggaatcctaacacagcaagaaatgaaattgtaatgctgaaatcaactagaatcgaaggaaatatatgtgtgtgccgcaagaacaggaggggaaattatattagggttcaagttcgataaaagttacagccagatcgcatgggcttatatggagtgtgccctcagctaaacgacaacagcgatgacgtccataggatgacaatctccctctctgtagcgcgtcgcggtgaagcacaaccctccgatcttcataacagctcaaaacaaaacggtatcagcgaatctcgaccgtggattcattcccactcataactagagccaatactgaactctgaactctgaatactctgaatattaagcactctggactgaacagtcctcacaatgctccccccttaagatccatgtcctcatggatgaaaagagggaaaaactttagtgatgaaagctgcatcctcccaggtggcagcagactttggaagattagcccaatgcaccttccactgaacgacaggctcattgtttcgcgggattaagcgacgctccagaactgctactggttcagataaaattctgccttcatcgtcaattagaggaagaccttgttcaggaatagcatgagagcccagatgttttttgagttggctaatgtggaagactggatggatttgactacttgcaggcagcaataacttgtaagcgacctgaccaacacgatccagaactcgaaatggtccataatacttagaatggagtttaagagaagaatgaagacccaaagaattatgccgataaggttgcattttaaggtaaaccatatcacaacctccaatgtgcgttcttggcgatgttgatcagcaaaatatttcatgcgagcctgagccttagctagattggacttgactgtttccaggatagcatgttttgcttcttgtgtgtttctggcaccctccagcaaagaacccggtaacaaagcttcagctaacataggtggtttggtgccatagagagcctggtagggagacatgcccaaggacgtgtggaaggtggtgttataccaccattcagcatgggccaaaagagccttccatttctttagtttggtaaaagtcatgcaacgaagatagttctcgaggcattgattaaccctctctgattaaccaacggtttgtgggtgatgggcagtgctaaaatgaagtttaaccccagccttttcaaagacttccttccacatgttgctggtgaagatgcgatctctatcactgacaatgacagtgggcaagccatggagtttgtaaaaattctccaagaattgagtgagtatttggtcagcagaaaaagggtggctgagagcaataaaatgagcatacttgctgaatctatcaacaatgacccaaataacatccttgccttcagatttaggtaaaccctccacgaaatccatagtaatgtgagaccaagccaaatctgggagaggaagaggttggagtaggcctgctggcatttggtgttcagtcttgttctttggacaaactgggcaagctttgacaaactgagctactgcggctttcattccaggccaatagaagagttgtttcagtcgttgatatgttgccctttccccagaatggcctcccatggcagaatcatgaaaggaaaccagtaattgagttcttaaattggtacctgccccaattacaaggcgatctttgtacctgagaatgccagccttcagagtatatggggattgaggttgaggtgctatgtgtaggtggctctccaattcttggcatttaggatcatgactgtaactagcaatcacctcggtgatccattgaggcacaataactatagtagtaagagcattactctgctgaattctggatagtgcatcagcaactttgttttccttgcctttcttatattcaatcttataatcatagctcaacagtttgattaacaatttgtgctgaacaccttctgttatcctttgttcattaatatatttcaagcttgcttggtcagttttgataatgagagaagtacccaaaaagtagtgtttccatttcttaagagcctccaatatagccaaagcctctttgtcataagtggataaagcagtagcttttggtcctatggctttactgagataagcaaggggtcgtccattttgcatcaaaacagctccgatcccatggccacttgcatcagcttccaacacaaagggaagagagaaatctggcatggccagaacaggggcttgagcaaggtgcagcttgatggtatcaaaggcttgttgctgtgctgttggccaatggaaattgttctttttcaaagcatcaaacatgggtttgcaaataataccaaagtttttttataaatcttcggtaacagcctgccaaacccaagaaacctcgcagttgagtgatagaagtaggaataggccactattggactgcttgaattttagctggatcagtagcaactcctgattaactgatgatgtatcccaaatattccacttgagattgcccaaaggcacacttgcttaatttggcaaataaatgatgctgtcgcaatagttggagcactaggctcaaatgctggacatgatatgtgactgatttgctataaataaggatgtcatcaaagaaaacaagcacaaatttgcacagatatggtgctaaaatctggttcataagggcctgaaaggtagcaggagcattggttaacccgaagggtatcactaagtattcaaaatgacccacatgagtgctgaaagctgttttatgtatgtcgggttcatgcatgcgaatttggtgatacccagaccgaagatcaattttggaaaagacttgagctccctataattcatccaacaaatcttcaataacaggaataggatacttgtttttgactgtattggcattgagttggcgataatcaacacataaacgccaagtgccatcttttttcttcactaagatagctggggaagagtagggactcatgcttggctgaattgtgtaagaggttaagagttgctgaactatgtcttcaagggcattctttttgtgatgaggtaatctgtaaggcctgacagtaactagtttagctccaggtaagagtggtattgtgtggtcacaatctcttttggggggtagggtatcaggtttagcaaagacatcagtgaattgctgaagtactgcagtgagagctggtaatggagttgttgctgtcacagggcagaacttaagaagtgacaatagagaacagctcccaccactccctggttgagcaatttttccatagcatgtgctggtaccacaaagttggatgaagggacactgatatctggcaatgtgatttccaacaagccatctttaagaattgttaattctcttgttttgagattgagagtcaaagggctgtggagaagaatccaatcacaccccaaaattatatcataaccagtaatgggaagtagcctgaatgaattggtgaattgatactgctgaatagtataagaaacattgacacatttagctccagtataaatagtgcccccattggccaccttaacaggaataagactattgttaactatctccaagccagctttgctaacaagtttaggggaaataaaggtagtagtactaccactatcaatcaatgctgtggcaaaaattgtgccaatgcacacatgaacagtaaaagtggtagcagcagtatttgtaccctccagagcatgcagggacaagtcctgatgtgtagtggccacatgttcaggactgcctggtggtgtggtaaacttggtgtcagcattatcaggtgattcttccccatcatcttccaatgtaaccagatagatctgtttaggtgctttgcatactcgaccatgtccaggaacccagggttcttgacatttgaagcatctgccaaatggcttaggtgcagtggtaggatgaggtttatcgtccttcaagacaggttttgccggtatcctgagagtgtctttgttctgtgacaatgccactgtggtagtactgcgaggaggaacatcataattccttgcatgttcataagcatcaaccaaggaatgaatgtgtaaggatttcagtggccgtttgatatgatccttgaggctagaaatgaaataatccaaaaggtactgctcagttagattgggtctatttcttttcaccagagccatgacttcctcaaacttgtctatatagaacagagctgtactgtttcaagttcctgaaggtatcagtgatttcaatgttggatttggctgcaaatctttgacaaatcatagtcttgaaatctggccaggtcgacctctcagtgggaacatcagagctggaaatccactgatcagcacgacctgtaatgtaaatttcagccactaaaactttctcttcctctggtgtttggtttagagcgaaatacttttcagctttccttatccatgattcaggactttcaccattgaaaataggaaaatcaacatgcttggatcttctatgtgcattctcggcatattgatttcgttcccggccagggggttcatggtaattaacaaatcgtctgtcccaattctgctgaggaaaaggttggttaagtggtgtatggggtggtggtgggtgttggtaaggagggatgttccaaggtgtgttatagggagggtagggagggtaataaaaaggtggtatatactggtggttcacattatagggattgtaatttgggatgttgggcaagttgttttggttaggtggtggaggtggagctggtggaaatggtggtggaactgtaggtgtgttaaagtaaacagaggtattccattcaggtggtgggggtgagacatgtttgggagtgaaaacagttggtggtaggtctgctgtttctatggtatgggtctgaattgggcatctaatgtttctagaatcaaaaaggggttgtctgttggtactagctgcattagtgtccactgcttttcccccctcctacaacaaactgtgcaaaaccaggtgttttcggtgttcccttgatttcctgccccatgcaactagttgttccccctaacatctcttgaattgacaacaaattttgcataatctcatccttgtgtacttgagcctggactgcttggttttgaagctgctcctggaccagcttatggtcttcttccaccttcctttgcaagtccaccatgtgcagcctgagttcttccaccgctgtctcccatggttgaacctcctctagaactggctcttccactcgaggtccccttggcatggttgcaaacacagatctaggaatttcacaggggaacaactagttagtccccaaaccctcactgctctgctaaagttcttgctcccctgatctgattccttggcctcgcttaggaattttaccaggaaaacaagtttcccaaccctcactagcctggactatcagatccggagtgctcccatcagatctgaagctctgatacctttttgttaggaaccaaacgattttggttcaaacaaatttggggggaaaattcagatatggcaaatagctaactaatgggaatcctaacacaacaagaaatgaaattgtaatgctgaaatcatatagaatcgaaggaaatatatgtgtgcgccgcaagaacaggaggggaaattatattagggttcaagttcgataaaagttacagccagatcgcatgggcttatatggagtgcgccctcagctaaacgacaacagcgatgacgtccataggaagacaatctccctctctgtagcacgtcgcggcgaagcacaaccctccgatcttcataacagctcaaaacaaaccggtatcagcgaatctcgaccgtggattcattcccactcataactagagccaatactgaactctgaactctgaactctgaatactctggatattaagcgctctggactgaacagtcctcacagccaccgcctccgccgccgcactgagcgcgatggcaatagcggagggggaggcagcgcatggcgtcttcgcctacgccgccgcggccgactcagcatccgcagacgacccgatgacggtgaagatgctgcgcgacgccgccgcggatgtcgttagctcctccacggcaacgcgcatccacctcttccgcgaaatcctcccgccgcttctcagccgcggatctggtatgctcctctctttgctctcacgcgagatccctcactcccttaagcacaacgaccttctcccgctcctccataggcctcgtagagcacatgtctcgcggagacaccaaggacacctcctctgtttgcctcagggtgggtcgacatttcaccgaacaggttgcaggcaccaaccacacccatgccttgccagatgccactgcctactccatgtcaagtttgctgcaaacatcatgcacacaccgggcctgcaaatttgcaatagctcttgccgcttcaagacatgaatatctcttgttgtatttccacaccttcacaacaccataaggatcaaacacctaatgaagcaccatctcagtgataggatataggacatgtgtagtggtgaacctgaggacacgatttaggactgccttgagcgttttgctgaggcctggcgttccatcaaacacttggtgggcgcctgtttgctgagtataatccagtctgaccaccggtcgctcctctgccatctctggtcttcctatccacttccatgctcccgatcccatgaacagtaggctctgataccatattatcatgaagcaagcacaataactccaataacatattgacatgagtcccagtttttatgcagattttgattgttctgtgccagtattttggtcacatatgcaagaatttcatgtatatatgccctgtgaccgactttctcacattcctttgtttccaaatgcagattcagcattatttgttgcacaattgatacgtttcattttccgaacgttgccagtgtatgatgatcaagcatctaataatgcagtagatgatcttgttcaattggctttgagaaaaccaaccttcttggggcattttgcatttatgcttgttgagacaatggagcaaaacatgaagtttagcaggcctccacttgtatgcttcaaattactgagatggtcgatctgtcttttgaaattgaaacaacaaacagagcatgatttctcaagaatattcaatgcacaagcaatcttgtgtcaaacactaatgactgaaaacttccgtcacatccattcatgcagacagttatttgtccatcttttttctgaggtattttacatacataactgcatcagatgtagttgctatagttgtcttaatagttatttcatatttaatctcttttccagctcagcgaaactaacaggattacttgtttcatattttgtttcttttccagctaagtgatgtccataaaatgtatgtagagaaggtcagaaattctatgtttcatgtcagggaatctccacaattcttcaagttgatactagattttgcgatgacctcttcatccttgtcttcagaatacaaggtaaatattcaaacccatgcttggctattacttttcatttgtttcttgtgcgttccacatatattcacaagagcacaagcacccttgcatggattacacacagaacgaatattactgtggacctggcttcctaggtacttcccttgttaagtttttatctaacattgacaatctgttgctatccctttcagcaagctttcctatatttatatgttggagcgatcataaattcgaaagatcagccgtcacaagaatcaagttgagcttttgtgtatcttttatcacatattgggtgtgacgactttgagaaggttgttcttccatcatgcttaagtgccttgaaagagaatcctcaaggagtgctccaatctatttgttaccttctgaagattatctgtcttgacctaagcaagtattgcatggtgtttatgccagatattctacgtcttgttcagcattctgatgaacagatgagggcggatgctttggtgattgttgggacattaattataaaatccactgatcctgaaacgctaactactatgctggatgctattacaacaagtctaggaggttgtacatatatattttctattatctcaataactcttatacattgtgaattttgatttagtcatctgatacattctatgtgatcatattagcagtactatttgtaatgttttagatcctgctggtttgattcattcttgacacattcaaaaaatttgctatagaaactcatgtagctcttaaagtcttgacaagcttgttctatgcaggttctaaggaagaactatcaaacacatacaagagaattggaatgataaaggcattagcagaactgtcaacatctccagctgttcaccaaataaacactgttgctgcctcaatatctggtttcctcatgacatgctataaggatgatggtaaagttaaagtgttcctatctatgcttgatgctctcatccaaatggatctctccatagttttgccagctattgacaggtataaagcaggtcaaaatggcaattctctcagctttgggatccttgagttcagcatcagctgaagctgttcaaccagatcttgtttcattcataactacaggcctgaaagatgaagtctgtttaaggaagggttatctagagttattacgagctgtatgcaaaaattctgctgcattaagaaaggtaagaaatatacttgtaatatttgtctaaaaaaaaaacatctagccttcctccaatccaccaaaaaagtaaggggtttcggtgcatgttggttatgaaaacatactctactgtgcagatcaccagtttgttggatcagctggttcagttgctgataattagtttcacaagcacaacacaacgattggatggaatttacacactctttgcagtatcaagaattgttgctgttgatacagatgcaagtttacctacaatttgctctgctatctatgatgcttgtgggcaagtggacctcttcacattgatttgccaaaatgaactatcatcgaattctgccctatcggtaatttggggtgccttgaatttctactgtggaagtttttaccacctgcaaaataatttagactgcacattttatctcctctgcactgctggttcatatcatgtcataaacgttggagtcattttctgtgtctattatcgattgatgtaattaaggggtatgtttcaccatatcattcccattttgtttgtttttctgaatatgatgaaaagctgcatgtattatcatcatgataacatgcctgtagaaaaataaattaatgtgaagtaatgctgttcttcatggtaattgacagcaattttaaatttgcaagttagtacagttcttttgatgctatcataggagttaattatactatggtgtttttaataccgattttctcctggcagctttcagaactgtcagatgaagattgcttggtcactgtggatcttgttcaatcattaattgtggaaaatctttcttggtatctctaagcattccccttacatttatctgcattgccttttatgcattatgtttgttgcattagccataaccacttaaccagtgtcctttttgtcttgcaccatttttgaactgcagggttaaggaaaaaatctctatccaatcattactacaggtatgcatggagtaatgttccaaattaatgatttgtgttgtggccccgaacttcttttgaaccccttgtattgactagtagcgtctgtggagtatggaaagtagagtaggacgcttcaaatatcatatcaaattgcactaattatcttttatcacacagctgctaattcatccggcgtgccacccacatcgtgaagttaggaagttagcttatgttgctaccgagaaaatacttgcaagcactgctgttttaggccaagatcttctcctcttattcaataactggttgtcattgattggaaatagaacattaactttggaacaaaggtacattattcttgtcttatcaataattaatgcttctttattagtagttcttcactatagatttccacttcctgacacctctcctttataaccaatgacgtggataggtctactgctgcaaatctgtgtccaacacctattccttctactggggtccttatcaggttcttgtttttgattgcaccttatgtggttggccacagcccaagatcatattctcaacttatattgtgctcccaccacccttgtatttccaactcccgccctgctgctgtttggaaggtttgctcttgctagctatcttttgtgctcgtttcgtggctaattggtttgtttttctaacttcagaggttgcagagagttttgaagcaccaccagatcgtttttattgatttaattgctaccaacatgtcggcaatattcatggtaattattatttttaattattttttacatgtagcatctttatttgccggctgagagtatgttatatttctttttgatatactttgaatataatagatcattgggttttctgaacctcgcaccaaatgtaaagaggttcaaaatgcttaaggaaaaaaaaagctgaatgtatacttctgcttagcatgtgtatattgttacatactgcatttctgaatttggttgttcaatggcagtcattggcctggttacaacatcttctgttttgctatgattctaggacatgattaagctagaataagctgtgtttgtactgtggtgaaggctacttagtttctagggttgtttgttaatatttcacatccctctatgtaccatatacctatccaagcagttgcttgcagtccacctgccttttgtaatctttgtttttgaggtcagcatgttcaggtcggtcatcttgaccccttggaacatccttaagaaaacatgatacattaatgaagtgaacacatcgattactgttttcttaaagtatgtcaaataatcattataccttgtaaatatgatttcaaacagttttattaaagttatgaaccaatttcaaatagttgcgtaaggttagggctattttcacaattttcttggttgggttatttcaagcaagatgaatggatggctaaatctgctgagaaaaggataaggtacctaatctatgtgttaattctgtctatactctatagaataccgtacaattcttgtcctaattggcccaaaacgcgtgcattctgatgacatgccacttgagagatgttgtagtttcatttgaaggataaaaagaaggggagatatgctgttgtattttagtagtatacattatagtgcatattctatgttacattttgtctgtctttccttattctcttcttaatgctggctctatagcattattttcagaagatttattattcacgtttacttctaataacctagaatatctgtatcatccataatctaatttactatttgccatgcatttctttgttggggagcactgattaccaatagttttatttccaggaattacttagacaggatgactccttaacctgtgatgaatatgcacttgaagcaagattacattcattacggacagtagcagcaatattacccaacaacggacttccagaattcgaggtatgtttcttgatttttctaataaaacctgtctattttgtttacactttcttctacggttgtcttttgagaaccagcacattagagttcaagtcgttcacatgacctgtgatgttttttgttgtttctgtgactaagctaaaatttgcaactattgtttggtgaaagggtggcaacaatcttcagtaggccagaagtgctgaaccatctgaagcagcaaatgcaccacccacggtctcagtaccagcaggaagtaatgcaacacatccagtcaccccagtaccacagccaccagcaccagcagctgatcagctgcaggacatgattcctatgcaaaaagaagtaagcaaatttgtttgttcttatttcttcattgattaaacacatcctcgtgaataacatgtaccaccaatgtaatcgcaggctttcattagcctgctaaaagcaatctccactagtgctgcttctgccaccgcaacaatcgccatctttgtagtaagctaccccattaaatggccagataaagtgtcagttaattaccagatgatactggaggctctcctctttgttttctttcctctggcccttcttgccacgggcttatcccatgctgctgagaaagatgagagatggcttggtcttgcttctgccttggttttatttgaattcttttatgctttggctttggggggagggatatccatcgctatacaagtgagaccaagaattgcagtgtgtgccacagtattctcttctatggtggtgattacttttgcgtggagtttaatgttctcgcacccggaggtatgttaatagaccttaaatattttagtttaggttccctcgatctttttgtattttttctgtttttcactagaatcaggttgtaactattgctggttactattccaaacaacagttcttaaagaagatgcacttttgggcgcgccacccagacatgccaacaggagacatgccccagtctccccgaagttctctctcgaagcttttcaaggtatggtttttaggcattcatacgggttatgggtattccttttcgttggttcttacattagctttaattggcttacttgtaaaccatagtggttcaagaaggagtcgtctgcgcctagtcaggagtcagtcacagaacaagttatgccccagccaagttttcggtccaagttcatcgaggtatggtttttaggcgctcatactctagcatgattattcccttctgttggtggttcttacagtggctttaattggcttgtatctaaaccatagtggctcaagaggtcgccgccgccagtcaatttgtgcggtatcaacatcgataagacctcttctcaaaaaaaaaaaaaaacatcgataagacctgatgacatttggattgacatgatgatacctgatggatatcgagctgtatagacgcactttctcgtttgctttggctgtacctgtaattaatgaatcctgtgtagctgtatggagtgcagttgtttgcaatttggacgccgcttttttagaaaattcaaactcgggtaataattatactaactatatttatactaagtattatgcatgttatatcactaaattcatattttgaaatatttcatctgatactaatttcatatttattgggatcataaaatggaataaaatactagtcaaatatgttattgaaaaccgtgtaaaaaaatataaaccttataatatgggatagaggaagtaccacgcaacatttcgtgactgggaaaaaaaatttgatggcatgaataaaaacattttggaaatttgacttgagcgttacaagtacaagtataattttgaatttttttagttgagattgaaagattttgattcgaatttgagttgaaagttttagtaaatcccttgtgtacacatgaaaactcacctaatctcttctataccctccaattttacacgatcccctctgtatccctaaaattttgctttgatcccttccatgccctttccgttaggtttccttcattttcacattatgtgtggttcctaatgtctaaaacacccctgtagatggaagagtgccatctagagtggcagcaggagggagatggccggcgatgcccgcgcggcaggaggggcggcggcccgcggcccgcgcggtgggaggggtggtggctggtggcccgtgcggcgggggcgcggtggccggcgacgctcacgcggtgggaggggtggtggcggcgtgacagcggctggacgacggcgcgtgcggcgggagggcggtggccggcgacgccccgtgcggcgtgacggcggctggacgacggcacgcgcgcggccggaggggcggcggccgactgcccgtgcggcaggggcgtggtggccggcggctcgtgcggcgggagggcggtggccggcgacgcccgcgcggcgggagggcggctggacgacggcgccccgcgcggcgtgacggcggctggacgacggcgcgcgcggccagaggggtggtggccggcgccccgcgcggcgggagggcggctggacgacgacgcgcgtggccggagggcagcgggacggcggcgcgcagaggccgttcgcgtggaagaggatgcgggagaaggaaaggggaactttagttagggttggcaggggcattttggtattttctaaaaatactgacaacacaatacacggtttgagcaacgtatctaatggaaacctaacgggagaggcatggaagggatcaaaacgaaatttcaggggtacaaagaggatcgtgtaaaattcgagggtatagaaaatattaggtgagttttcatgtgtacataagggatttactcaaagttttaaaatttaagttcgaacttttacaatttgagctgatttttaaaaaagtttaagctcaaagtttagtccggtcggcgtctacatgtgcatgaagtccgccgcaacctaggattcctaattcgcgcgtacgcgccccgtgcgcgtggcggcactgcgttgttagatcgataattttttataataacgtgtttaacaagttagttaaagataatgacagtaattaaggaaagtttatctttttttagagatattttactaatagattgaaatttttcaagttacatttgaaaactttggacttaaaatttaaactttgaagtcaaattttgaaaactttcaactcgagatttgaaaactttcaactcgaatttgaaactttcgactcgagatttgaaatttttttactcagatttgaaaactttcaactcaggtttgaaactttcaactcgagatttgaaaactttcaactcaaaattcaaaaacttttaactcatatttgaaaactttcaagtcgatattttggaaactttcaaatcgtattttcaaaattttcaagtcaatatttgaaaacttttaacttatttttattgagaaattacttctctaacgtcacgcgtgctgttttgtttaagaaaagcactactactgagacagaggcccgcgtgctcgctgacttcatgtcctcacgcgtgcgtgcgagctagcacccccgccacaacctcgacacctcgtgcaccacttgatggcgtggaattgctttctttggcctacagccgtttccctttgcaaaaagtatactttgactccctcaactattgcccgagtatgattatctcctccaaccataaaaccgagtatatcgactcctccaactatcaaaaccggtgcaaacaatgcccctccgtggttttggaggtagttttggctgacgtggtgtctacgtggcagtcttgaccgagtctttgacccatgtggcgcttacatggcattagaacaaaaacaaaaattaaaaaaaaataggacccatatgtcattggcacaaataaagtattgtgggacccacatatcatccaccctctccttcccttcttcctccccggtccccactctctctcgcttactcctctctctctctctctccccccggccttctccatgggcggcgcgtctggtggtagactggtaggggcggcaccgtcgggggctaacccagaacgaccggccggggccagcgcccgtgccgtcgtcggccatcgactcgttcccgacggtgcagacctccggagcgcacctgtctgacggctcgcagtgccccgtctgcaaggaggacttcgaaggaggggcacttggcgctgtaagctatcctgtgcatggcggcgaccgtgtcgatctctgcggcggcggcgacctgtaccgtcttgcggccgcttgccggcgtcggcttgggtttgggcttgaagtgatcgacgtcgttctccttgctgctggcggcgggatggggaggaacatgaacttctccttgccgtcgttgtggctgcggccgacgacgagctcgctgatgcgtgttgataaactttgttgtgtcctcgtctccctctcatatttctgttagctagttgttagacttagcgttttttcagttccctctgagtcggagtctgttagcccacgacgccatgcgcgtggagcattttctttctgtccgggtcgctcgcctgtatcgccggttcgtgtgggatggcacgcgatgtagtggcgtatatatggagcgcgcatattgcatctgtaatcgcgtgaataaaaggagaagaaaacccgaaaacccgcggtggcatttgcagcacaaacagcctcttttctgttcgtcatcttaggttagtttcgttccattgaatctccaacaatgcggcgccaccgcgccatggaacccgttgagccgctcttcctgggcgggcgtggggaggccgaggccgaggcggggccggcgccgggagtccagagacagtagctctccggcggcgcgccgtccaggccgccctcgtcggacgccaccgcggaagacgacgacgacgtacgtggaagaggaccacctgtcgaacgagccacgggactcctcgaggaagagccgcccgagcggggccctcgtcccgtcgttcgcgcggctgcaccattgccgcagcatccttggccagctactgctgacgatcgcctcctcccccggcgccggcacggccgaacaccgggtagaacggcttgatgcagccgtcggcgaacaggtcgtcggccacggcggcggtgcccgcgggggattttttttttgtccgacaatactttatttgtatgaatgatgtatcgtcccacatattttttatttttaatttttttataatgccacgtaggataaagaatcggtcaagactgtcacgtaggcgccatgtcagctgaaaccatcatgtttgaaggacatgaatcatacccgggcgcaatagttgagggagtcaaaatatactttttcctttcccttttaggcttgacccatcttccttttcttttgtagagcggcccaaatccgaaagggtggggagatcagatgggcttttgtggcccacattatcattttgtctttttagattgttttttttcgaatcagttcgattttatatttacaaagtttacaagtataaaatttttatgtacaaagtttctatatataaagtttacgtgtataagcgttatgtgtgtgtatgtatgtgtgtatatataaatatgaaaaatataagttaacacaagtatactaaaaatatttaaaaaataaaatattttaaataaaaagatttgcatattaccatagttagtttaataatatatctagtaatattattgttacatgattgcttgtttttaattttttagctattaataattaaagttaaaattgcttcacttagcattattttggagggagtaggattatgtcaccaaggtgtgatatttgacctaattacaggttaacactactccgttttacatacgttctgttgttttcaaaacgcgatttatctaatactcctacatttgggatttggcccacacgggcacaacagtgagccagtgagcggtgctagtatagctaggcatcctatcggagccatcgtagctaaacgatatatttgcaaataaaaataaatttatgaataaaatttttatacacgtgtttctagctagcgatttaaaagcaaatgctgaaaaataaacttcgattaaaaaaaaatcttaaaatcaactctaaatttaaagttaaaaatttaaattttaactgataaatataagtataagggaaaagatagtcactattaaagtactagtgtaggattagtgctacggaatgatgtggatgcgtggcctaatgccactttcgtttaatctaaagtacgtgcgctgttgggtggttgccccccatcaccccatcagcgacctttcttttcggtgtacttgctcttctctgaacttcatcagttcatccattgcttcatcaacaactatggttaattaatttctcgagaaatattacctgaatatatattattaacaataattcaaaaattacagcaacgaaattatactagtacacttcatataggaaattaatgtgttgcaatggtatacatatgaacgtacgtaactttattctctcacatagagtatgcatgagctacatgaacacaaaaaaaaaattaacagcttgcggattaacgcgaccgatgaacttaattaattaccatattgccactagccgctactcaaatttgtgactcacacctcgacgctgcaccctgtcggctgcgtgaacctgagcgacgcgacggcgccggcgccggtgccgttcacgacggcggcggaggcgccgccgagaggcatggggccgacgccgcctggtccggcggaggcgagcatggcggggcagctgacaaagaggtggtagctgccggagacccagctgccgaccttccacttgacgcggccgtcgaccttcacctgcagcgcgacgtacccggcggcgacgtcctgcctgagcgcgtcggcgacgaagcccgccacggggacggactcgccggagagcacgggcgaccagatggtgacgtcgcggtggccctggtaggtcggcgggagggagacgggcaccgtgacgggttcgtcgcggtaggtgacgaagacgtcgaggcggcggtagtggacgccgacgtggtcattggggttgcgggaggcgagggtgacctgcgcggtggcggagagggaggggtcgccgaggtcgacggagcggagctggaggtcctgcaggtagaaggacggcttggaggggcggagcgcgaggtagacgacgagcgcgatgaagccgacgacgaggaccagcgccaggatgcacgccgccatcccgccgcagcatcgccggaggtggtgctcccgcttgtggtgcttctccttgctcatggcggcggcgacggcggcggcggcggcgcgagctagcttagctacgagtagtagagtgagagagtgagctgcgagctgttgctgagtgagagagagagagagagaggggcgttagatatgaaagcgagtaagagagtaataatggcttttaagattagtggagcgaacgaattgaatttaagtgtccgtactcaaagaaagaaaagggttttaaaatttcgcctttgaaatttgagtaaagtgcacgtgcagtatttaaacttgtaggggtgtgtcatataggtcgctaaactctcaaaatgcatatctaagtaccagaacttgtcatagtgtgtcatctaggtcccaaatcaccacaacccctttagaatcctacgtggcgttgatgtggcatgccacacagacatgacgtgttttgagataagttttgggacctggatacactttgacaagttttggtacctagatatgcattttgacaatttttgggatctatatgacacaactgtacaagtttaaggactgtaaatgcattttactctttaaattttgaagggaattgaagctagctagagaggcagagagctctggatcgaaagctacgtctcaaccgaagaagattctttcgatcgttgtgcttggggttgttctttatgctatgctatgctaggtaacctcttgtagatgatctgatgggccatcggttactggtttgggggcgatttctgcatgatcgatcaatctgcctttagatttgtgccccactgcatgtgtgtttcctttgcgcgcttaggatggatcgaggctcgatcgtgtgctaattcggtgcttttaagtaagttttactcaaacttgttaatttggtcaacgtataggacggcaatggaattatgctattgtttccaactttttgggttggtgatctcaagacatgcacgcacacccaccacttaatctgaaaactcaataattttcagcatgcatatgaagaaaaatgagataactaaaattttacgcatctgtcatacacacacacaccccatgcatctaactatagtctcacactctcactgtgtgtgtacatattatttttcgataatgtaattggatccaatttcactgcatatatgaaattgttggaatacgaagtacccattgtatcttactattttcactgcattcattattaatagagaagaaaacagtgagataacctgtatttgtacggattcaaactcaggatgacgcattgctcatgcatggcatcccctacaagcagaactagcgattgttcatggtaacacccattattgatagagaagaaaacggtgatataagatgtgcatatatgagggcacgtattgtgtcatacacctatggaataataatgacacgagaccgcttgactatactagctagcaagttcaccgtacttggttttcataaaaaaacttttgttttagacaagatctggtcaagtttttttttgaaaaaaaatcaaatccatttttaaaatttggacagaaaagcgagcaatttatattctcgagccagtcaaaaagttcaattttaactaaaaattaatcctgtcttcgtaggtgaaccaggacggctcccccctaacagacttcagtacaggcagtcgtggagttacccactcggtccgctcgtgcagtaggagtgcctgtaaaaaaaatcatttttcaatagtgcgtccggttttcgtcggttttgtaaaggaaaaagtatgaattaccccccgaactataacagtcgatcgaattaccccttgaacaacaaaaccggacattttacactaccggacaaattaacccccccccaagcactattctgagtggttttggcttaagcttgcacacgtggcggcaacgttgcaatccagtcagcaaataaaaaataaaaaagcgttcgggcccacctatcatccccaaatctctctctctctctccatctctatctctctctccctcgggcgaccggcggttgacggtggaggcggacctcgctccgcgcggggatgggaagcggatggcggtgcgtgggaggctgcggcgtgggtgcgcgaggacgggcggtgggcggcagcacgcggaggcgggcgcggctgggtgggcgaggtgaggatggcaaggacgggagaggcgagcgctgctgggacggacgagaagagtgcggcggggacgggcgaggtgagcgcggcggcggggaacatctgcactatatcggtcgaagacgatgaactccgatttctctctcgcaagcgctcaggtggccggctgtggcggtggaggcggagtcgcccaggcggttggtggtggcggcggaggtggaccggacagtgggtgatggtggcggaggcggacagggcggccggttacggaggcgtggctcgcccgggcagagagaggaagaggggaaggagagatatgacaggtgggtcccacatctattatattattaaaggaatagaaaaaggagcctccacgttcgctctcatggcgtagaaattcgcacattaatcggagaaaaagaaaaagtagagtccatatagaaatactacaatttagaaatagttgaaattcagaattaaaaataaggaatattagaataaaattaaatttagagtatatgaatttaaaactaactaaaatttaaaataaatataataaaattaaaagtagagtttagagtccgtataaaaatacaatttacaaataactaaaattcgaaattaagaaaaacatgggaagaagtcaatatagtaatacaatttagaagtaactgaaattcgaaattaaaaattaaagaatattgaaagatgagtttaaagtccacacagaaatacaattagaaataataaaaattcagaaataaaaataaataatattggaagaagagcatagagtctatatagaaataattcatagaaaattcaaaattttttaaaaaataaatattaaaagacgagtctaaaacctatataggaatatatataatttacaaataactaaaatttgatattaaaaataattaataacaaacacgtatataaaatacaatacgggtgttatacattagtagttttgtaaagttattgcaaaatttaaaattatgttgtcattttaatatatttgaataatataataaaaaaacatattctgctattatatgagagaaaatataatgatactagctgcgcaatctgcgcgggccaccatgctagtttttttttaaaaaaataaaacgctgagtggtttgccacgcgtgcgccacgtaggatgaaaccactctagattgggttgagggggataatttgtcctgtattgaaagtttgggatgagaaatgtctggttttcgggtttagaagggtaattcaatcgaccgcgatagttaggggggtaattcgtacttttttttttcttttgtaaacccctgctagccagggtgccaaagtatgtacagtacttggaggaaggaggttgttgggaagtacgtagcagggggcaggcagggcaggcacaggaatgatcgcatggaccgggcgcggcggttgtgatgtcgcctccggcacaaaacgccgcggaagcagatgatcgatcgatataggccaacccaagggcatgatgcgcatggctactgtactcatgtgtaggtgcataatatctttcgattcccaccgactctccgatccaggggtgcactactgtgccctacgcactgcctacggccagatcccatcaaaattgcaagccagatgcagctagcagagagtctgagtactgtgcacatacaagtgcacatgcctaaccgtgactttgtagctttccttcttctctatgtgtgtaaagatatactccagtttagtacaaagtagtacgtagtatatgttaatttctggtatatatacacgtataactaactcgaatcttagatgcatcatgtggtactacgtacgtgcaccgtctttcatttctgtagaacgagttaacggttcattaattttgatttggataagcctgctggataagttttaaagtatacttcatccgtcccaaaatataagtatttttagcataataaaaaatcaaacattttcaactttgactattaataacaagaaaaataaaaaagagtagtcatgtaaaattgatgttagtagatttattactaaacaaactatcataatattcataatattcataatatgtaactctttttatttaaaatatcttcattttagtacggatggagctagctagccaaacccgtccctggagtaattccctgtcctcacctgcacggtcttcatctcccttttttcctcctttttctacgaggtgatgagacatgttactttgcatatctctcaccatcctcatcgatcttccacagttcacgttgccgtgctacttctgattccaaccaactaggcatgcatgttgttacattacacccaccaaggcaccaattaccatcacttgcaagtagtagttgcaaatccctctatggctttggtagctagccatatagtatgtgtgcatgcatcacactcttggtcgccctgcaggccactctctgcataatgagctctatgacaagaacaactaatgtccggggaggaggccattgcgattcaacaaatttacaaagtgactacaacttttattttatatagaaaaaaaatcctactttatttgtaattgtatgccactgatgtatgtcacttggatttgtagcactgagacgatgtcactagccagctgggcttaccatagagctttcatatatcaacatgctaattataattatatagcttgattatgctagcttcttatatatagaattttaaatgtaacggtgcaaaagcacttacaaattcaacggtcttataagaaaaaggaaacacatacgacccaaatgacgtactcttggacatgcatatgtcacctaccgatacagtttcgttttttaattttaagtttcgtcctttggttcatgaccaaacctatcgtcggcaccagctgctaatataagcgtgatgaatcattcgacctaccaaatgagcatttagtacgtgcccatttccaatatgatcttttcctccgtatacgtaagtgctgcaattaaacagatcaactggcacatccagtgttatttggtccagtggcgacgaaaagtttgatctcaagattacagattaatttacagagtctgatcgaatacacacaaatatatactacagtactacatgacttgttgattcattcatgtgcacatatataatgctgatcaaacttaaccagcaaaatgttctaaatcgtactcactgattctatgtacgtacatgcatgattaatcacgtctgttgcaccaaacagtttacttaatatactagtacaagtacttgaagttatatatgagattgtggtatatatatatattactctctcggatccactgactacgaaaaaacggtgtccaggctaactatcggttgttaattaatttgtgtgaaattaacaacccagtggcggagtcaagaattttaccctgtggggtaccattgcttcataatttagtgggatcatttacataaattttagtgaatttacatgtataaatcaagagttacaatggtgtattggtgtttgtgaaaaagctgtgggaacaagcgatcccacagcctcatacatagctccgaataattaattaacacctggaaatggtataactagtttttgtgtggagaaacactaacctgaatttatattaattagtacctatttaggattcattacagtattcacttcgatagtaaatatcgtatgtataagattcagtcaaacttttaaaatcattattataatattgtgacattacttcttaatccaaatttacgcgtaccttttttttaaaggaattatcaagtatttagtaaataacatatagagttttagaggtttgacgaaatctctgtcttactcatatgatcaggtatagcataacatagtactagtatcaaagtcgcacatgccatctggttggttggctttgaaaagtaaaaaaggaaaaatatactatgtagtttcataattgtgttatgtggagaggccaaaatagagcatcttagttagtgactaaattatgtacctgctttgtaacaatatataacgattaggttttctatccattcaaaagttcctagagttgttaaatttaaatttaaaattatgggcccatcagatccgttaaataccttattagctgttacattcctgacaattgcacagattaattcattaaaatttgcaaacaccattacttcataatttagtgggatcattttcataaattttaatgaatttacatgtaaaaacccagagttacaatggtgtgctatgtggatcggggtagtagtagtagggggaagtcgaccattgcacaaattaactgggcccatcttatgcccacaaaacgcagcacaagatggcccaagttcatcgcattgtcgatttgatcattccgcagatttaggccgtgtatagttcttttcaaattattttttgaagtatagggacacatttgaagtattaaatatagactaataataaaacaaattatatatttcgcctgtaaactgcaaacgaatctattaagcctaactaatctgtcattagcaaatgtttactgtagcaccacattgtcaaatcatggtgtaattagactcaagagattcgtctcgtaatttacatgcaaactgtgcgattgtttttttcgttcatatttaatgttttatgcacgtgtccaaacatttaatgtgacggaaaagttagaagtttgaaaagaactaatgctaaaacaaaaaggaaatgatttttttttttttgcaggggggggggtgggttgggggtgtgctgaccttctaataactaattacaaaaactagtaaaagaatagaatagaatatgccgtgcaaaggtacaattttagcgccaaaagcgaccaaaacaaggataatcggaggatcatggccagcaagcattgcagcttcaactgcagagaaaataacaccaaagcacaagctgcaaactctgacgctaaacacagcaatttaagcaatgcaaagattgcttcatctcatatgtgttcgatggaagtcattgcagaattctacaaaaaagataaaacttgcatgataacctcagcaaatcttccgcgataacgactgatgttctctcaactctctccctctcttaatctccctctcctaaaagatggacccataataataaacctatggttggtcaggttagtgaactgttaaccacaaactaatgatattgcaagcaattctgtcacaggtgaagatcagtgcaggcaatgttggttgttgctgtcaaattttcacatgccgtagccgcctctaggaggaacaacagcgccgccgttcaagctgagctttgacatgtcgagcatctgccagttgatcgcagatgggtctcctcctccaaatgagttggcctcaaagcaagaggtgacgctcctgctcctgcggtggcgcactgagagctgcttcagcctctcggtttccttcttcagcatctgcgtttggcctgcgaaattccgtcgaaaaccattcattgcgatgcacgagatgataacatgattttaacgcgatttaacatatagttcaagcaaggcataaaagttggcattgtcactttcatttacaaatgttaggacagccaaacatggaagatcaaacctacggcatgaatggtgcaaactaatgctttcgcaactattgacacaactgaaagcttttgaagttaagatatcaaactgacacgagcttctagatatttatgaatacaaatccaaattttattctgtgttgattgtatcataatgatttaattggtatccgaactgaaacatgctgatcatcaaacagtacatccaacaaaaatccagctggatagaaggttacaaggcttgcccctgccctaacaatttggtaagtgtattaggccaccaaacaacttagaagcaacaatagaagacctccagaatcaaacatagtaaagcacggaaatacaaaatctggtggccattgtaacatttattgtcaaactagcattgcatgaagctggatgcataagaattgccttcatggcaggatgagctatatctacgattcattctgtatgattcaggtttttttttctgtgacacatacgaaccttgtgcacatagcttggctagctatatctacgaaacagtaacaatccttcaaataacccgcattcaacatctgagcatagcttgcatgacagcaaaagcgtgaaacattatatagaccaacaaaaaatagtcacatcatctctgctacagactgaattcacctgtcatcttattgaacagaactacaatttataaccaaatgataggtgttgtttctgaattgtacttaggtattgattaaagagcacgcaaaatctatgtaactaaacaaggatgcatactcgaaaaggtttaatttgtgctggcaatttatgaaagggcaaacagattgacataccatccttaattagttttgcctgctgaagactagtgatctgcctcctcagttgcttgttttccattgatagagcattacgaagctggaaaagagatgccaccctcacagccaaatcagcccctatgttctgaaaatcagaaaataaatttatgccattaagagcaggtacaatagcaagctataaaccggctgtaaccatatattgagaagaaaagagaagagagagaagaaagcgggctacagatttgtagccggctgcaacacggactccaagatgttatgtgtgtatgagaggtgggaccgtgtattaatggtgtagtatatttttatagttaactattgtatgaatgagctattagattggctatagatgttttggagccagtagttggctatactattgaccttgctctaaagagttaagcactacttaatccaaaatggagtaataataaggattaacagcactacctgaagtgagtcaacagttctctcaagatcagcaatgtattgaagttttctgacccttgatctttggcctgagcgcctgcacagatgttaacatgtcatctcgatattcagacacattctattgttcttaatatctagagcagaattttcaacagttgacgaaattcagtttcatgtatgaaatatgacaatagtacatgaaaagaatctacagagataagatggtcttgacttggtagcatcatgcttcatagagttaaaaacttagtaatggattttcatcagcagaagtgtgggcatcaagatggtcatactatcagctcctcaaccacatatattatctaagatctgtcagtgttccaacagatacaatgggatgcccttggtaacaggattcttgcataattcacttgtcacagttaaaaagccttagtgcgagaaatagatcctttttttattctgagaactagaacccaattgataatctttgaagaatacatatatcacagtcctgatttccagattttctgcagtgctgtttcgatttcatgactgcaagttcaatgaaagttgtcacatcattaacacaagggcactcttttaaatgaatttcttgtcagcgtcaatagctgacaccgttatctttactaagctcaactagtgccactaaacaaataaactgtgaaccaataccagaccaaatttctttaactttctgaaacttaaaagacaaacgaaatgaaccaccatatatgaaaaatttgtgagaaatggtccaaaaagaatcctaaaatagatctttcaaaatccagtgcccgcttaaatatgagtgttcaatgagcccaaagtagagaattttggtcatgctccaaattgaatatttgtgtaaataaatattataccaacaagttcacataaaattaaagggcatggctagtcacgtcatatgccaaatgcctcctccctgatgctcatcaccgaccgctactcctctcatcccaatgtccctcaaaacctccaccccatgctccttccagtaacagcccaccatccagcctcactcacgacttcaggtataggtgtcaagctctcatccccatttctttgcttcacctcctgcagtacagcaccaccctcaccatcctcccactgcctcttagccccacccaacctaactccatgagattcccttcgtgccactttcttcctgatgttcagtggctaagttctccactctccacatcctgcccaataactgcttcactgtcattgtcacttcttgtgaccagcagcacctcactgcctcgccctcactctcctcccatggccccctaaccacacccaacctaactccagcgagctttgtccgcaacactacccatcttcctcatatccgggtggcaatagccaccaattgctcccccccccccttttactccagaatgacagggagctcccccaccccccacccacattgaacttaacaaggccacaggaggcagaggttgcatatacccaatgtgctatagactaagccaaaaatatcttatatctggagttgttactgctgaatagctgatgatagaaaccttaaattgttagtggcaaagacaaaaggcaaacagaagtcactaagattagcgttcaagcttaaccctccactgcagaatgctataatatatcagatatactggtacatcgcgtcagcatttgccaaaacagccaactgtactgattctctttgatataatactacctagcaatacattcttttcacctggactcccacttatatatatgaaatagtgagagcatattacattggttactgttgaattttgatttcagggaattgatttgaaaagacttggaatcacaaacgctatgaacaatgcacggcagagaatcataaatataaagcggtgtaccttttaagtgacttctcttgatcagcgtggcatacagcatcacctgtgtctccagttccattggctgcaccaacattacagttcacaccacttgtggcatcaatcatcaggtactgcaatgggttgctagggacattctccaagacagcgttaaccatggaactctctgaactggtcagcctagtcttctgtctcggcgaatttggtccataaacacagctaccttcgatgccagcaccacttccacccccttcagccgcagcattgaacgactccccagcttcgccaaccggctgcggatccccttcatcgatagggtagattgggctctggaacgacgtcagcacatccaagatagcatcagaatcgctgcaggctctcctgagaggaggaagggtgtggctcttcccggagtccgcgaggagatcatcgagccagcacggcggctcaccgacgaatggatcctccgacggaaacctgcagctctgcgtgaacaagctgtcgtccctccttgtgatctgaggacccagcggcgggcagcggggagggaggtgcggcgaccgagacatggcgagagaacacgctcccgacgtctgttcacctctcttgtgctacttaactacagcccctccaacatcatctcctttatcccgttcatctgcaaaaaccagaaacacatatagcacataaaacatgtgacaagaaacaccaaaaacatccagcaagtactagaaatcaaggcccccttgtaaactacattgccgcagaaacatttcctgttgcaaaataataaaaggatcgatcttctgtgggatcagaacccagtaagtgaggacaaacatcaaaagggtgcaacatgtaaaacaattgcaaattaatcttgaagcgcaaactacagaagcaagtgcagaggaggaagacctaatgtgtggaggtggtaatggggggttcggatgtacacccaaaaaaaaaaaaacctttttggttggaaacacgagcatctatcagttaaaggacatgaaagaaatcccagaagagaaccgaggctcggttaattgcagggaaagcaaaggaaaaccaatcccccaagtcctccggatggactcccaaaacccacaccacgcccggatcatcgagccgcgcggcgccgcgccaaggagaaaagagagaaccttcgattcgattcggttcggttcgaaccgaggcggcggcgtcaggtaggtggcggtggaaggaggccggcgccgcgtcgcgtgctcgtctgcccctgctcgccggcagcgaacgcgcgtggaggaggagaggaggacgtccggccgctcgcaccgtgcctgctgtcgccggcggcggcgagtgggaggggattcgggcggcggcgcagggtggcggaggaggaggaggagggagaggaggggttctagtagtttaggaggaggaggaattatattactcctaggaaggaaagaaaaagaagaagaaaaaatgattttatgtcccaaaaagacggggctagtacgcgggatgggccaggcccagcaaccacgccccatgcgtgtttactcctccccatttttggcaaccaaatatctctcgcctcgctttttgggcagaaagagagatgtaaaaataatacagtaataatactgtaagagaaaaatatcttgtcttgatttctcttagtagttattaccagccgaggtaagattaaattcacgtcaggttcgcagaaaacaccacgaaattaccgtgtttgatgaacacggctgtgttcgggaggcaatgttcccaacgtttatctcctgacatgaaaaacaaagctaggttaattgagtattggccttaaaaaacttaaaaaatagttaatataattttcttttgaaaaactttcctatagaatacttttacaaaatacgtattgtttagcggtttgaaaaacgtgcgtgtggaaaacgaatgagatgagctgagaaataaaggggaagaacacacgggttatacaaaggttcacaattttgatatctgatcaaaatctgctcacaatcaggtattaccggttttatagaatccgttgacaaaaaaaccgataaaatatgactaaactttgttaaaattttaaattttatcttcattttgtttgaacttgatcgaaaaaccaagttgttttgtgtttttgacccggtccggaaattcggattccactgaattatgaaccctgattgcaatcgaatttggagcggagttttacttaaaaaaaaaatgacgcgcagagtggatgcgacgcaaagcttctagaagtttccgtttgctgcactcctcagcttgatcactgctcactcacacacatgccatccggccttcgaagttcgaagttttggagtcctctcgagtgcactgcacacaaggtaagctatgctcaaggttcaccttttcgattcagccttaactgtacgatggtttctgaaaaatttcaatacaaattttggtcaagtctactgtttgaaacttgaatactcgaaaatcgttcgaaatagtatttaggaatctgctttcgtcccgcgtggaaaagcacaccgagtgggcctcgaaatgctttccgctgattccagttcactgtatttttaactgaactttaggagctttttaacagctctacgcctacgatctacgagcttaattggcactggattattgccaagatgctgctagctgacagcccgattcgtaatttaactccaaatggttgagcggatcgacgacgacgctgatggtggagtaaagaaaagaaagggaggcgatatgtccgttggattccgggcagggcagacttgttcagttgctgctactgcaggctattccagacttgtgttctgtgtgtgccaactgccaacgtgggtgcacattggtctttgtatttacttggaatcttccatcactcagggctgttcaaatcaataccaaaattaaccttttcaaaatttgacaataccaaaaataaatttggtatgttggtagcattaaagttttgataggatagcttaatgtgatggatctaggggaaaaaaacaaagatgatggagggacggagccaggaattggagctaccaaggtcatatcgtagctacattgtactatactatctatactataccaaggtcataacgatgttttcatgagcctagcggccccaatattttgcttattcaggaaataagccaaatgacatatttgcaagcgaaaaataaaatttatgaataaaacttttatatatgtgtttttaatgatctaaaagcaaatgctgaaaaataagcttcgacaggcccggctctggggcagggcaaagagggcgacgcctaggacccgttttggctaggggcccatgcctaaatgagtactgtatgagccaaagtggtatttaatattagtgaataattccatactatctactactcctggttatctacataattctgattagtgaattaataaagattccagattcaacaatcaaaattgtatgtatagatagattcttgttcataatatatatttccttaataattttaggtgctgaaaagctgtaattttactcaagatgcatttttatggtgctaagtaaatgggaaaaataaacaaaatcagtttaagtgttgatatttttctatttctttgaacatatatatatgaaatattttcaatgttcatttttctctatgattagatttgaaaacacactttaaaattaaaggggttgttcagattgtagccaaaataaatctaaccaaatttttgcaatgctaaaattttgacaatctagcaatattgccaagttttagtaggatttcttacgtatttactaaagtttggtaattaactaaataaatgcacatcattgacaattttgatatggtttgaaatgtcattaatctaaacaaccaaaaagcgtgaatatacatataacacgtctctctgtaggggagagagggttaagggtcatgttatcaagtttgccctagggccctcaaaattgtagagccggccttgaacttcgataaaaaaaaaccaaaatcatctatagatttaaggtttaaaatttaaattttagctaataaacataagaataaacgaaaagattaggctataaatgagacacttcactttctactgtcagattatggttttcctccttgtgatttaacaatactaacattgaaaacatattgagagagatcactaataaatcatactagtatcttactatactatctactccactagtaagaaaagttattcttatgcaaactttaaagcacatagaactgctttgagttttttacaccactatacggtgctacgatataaacctaatgaaaaagtaatgttgctaacaatccttttctctagctacatttctactaattatttaactgataacaaaacgcaaatcagccgagtgaaagtaggttgattctaccaaattattggcaaacaaaactataagaaataagttgagtaaccaaagaaaactgggtttgtgtagacgtgatcctagctaatgcgtgaaacaatattgcagctttcccaagacaatctattttttttacgctacaataaatcgttacttccttcgtcccaaaatattaacatttaggaaaatttgccataggacacccaaatttcgtgtaattagctaggagacatcataaaatcgcgtcgttgctgatggacaccataaaattcgtaaaatttgctataggacaccagagacaatattttattatttccgagcaaaaacaggagagagaaattttaaaaagacaaaattgccctcagccctatctaaccccactagagtcacacttttgcccctcacgccccccagccgccccgtccacacccctaacccggcgcagagaggcctggtgctgatttcgatgactactggtgagccccggggtagcggcttcggcagtggttggcgagcttggcgatggcttcgatgatggtcgacgagcccggcaacaacggcttcaacgacaatggtggcggcggaggccacggcttcgacgatggccgacggcagcggcgggttcgactgcggttagtgagcagcgctaggaagcgcgtggcgacgacggctttgatgacagtcaacgagcccggtggcagtggattcgacagtggcggtgatggcggaggcaacagcgctgggaagcgggcggtggcggcggtggcttcaatgatggtcggcaagcccgacgacaacaatttcgacggtggcagtgatagcggaggcagcagcaagcggcgttgggaaatgggcggcggtgacaacttcgatgacggtcaaaaagcccggcggcggttggcgagcagagctgggaaacaactgcgacaatggggaatagatagggctaagggcgattttgtctttttgatatttctctctcctctttttgataagaaatgataaaatattatctcgggtgtcctacaacaaattacacaaaatttatggtgtccatcagcagcgacgtgatttttcaatgtctcctagccaattacacaatttttaagtgtcctagggcaaattttgccaacattgtttaggttggcaagtgtattaagaaagcactacgtgaaaatgattggagaaagtatatgcttgattgaaaagaaaaaatatgtgaaggatagttattgtgattggttgagaagaggaggtatgcagagaaataactttatttttatgacaatatacatactgtgatagaaatagttatatttgggacgtactccgtagttttctgggttagcgagcctgtaccgatagggtcattgatttaaaaacagagagtaaaacattgatttggttaaatgtctcggtgtcatctaaccctatgggagtattgtagctccgcccttggacgcagtaaaaattcccctgatctcaacttcccaattaacaccggtaatggggacttgacacttgagcattgagctcctattgccctcatagcagatccgttaatgtcaccaaggttacggttatcaccaagggccgagtttagttttaaattttttcttcaaacttctaactttttcttcacatcaaaactttcctacacacacaaaaatctatcttttccgtcacattgttccaatttcaatcaaactctcaattttgacgtaaactaaacacgctcaagatgaagtaaccatagaatctaacctagtaccaaagtcaaaaccaacagaaatctaatttggacaatttgttcggtttttccatcgtcaacacatggttgcgaagcggcacgaaacttcgaagctactgggaagaaattcggaacggcacgaaactcttttttgttcttttcgcatgaaacaaaaaaaaaaaaagagaagccaatctgatggacgagagatgaagcaaacctcagccgtccatttgtctcccacacacaaaagcatattctgatattcccatccacgtcagcatttccccaccccaaacacgcgatccccattggccccccgcgaatccaaacctcgccgctccaaacactgacacccccggccccacctgccagcctccccaccaaccgccacgtcagcgtgcttcacgcgtgacgtcacgtcgtcgtcttctccgtctcctctcctcttcttcctctcgccatctcactcgactcgcccaagaactcggaggtgttcgacgcggtcgccgccgcagcagcagcgagccatggaggcgagggcgtcgccgtctccgtcgccgcagcggcctgcgtcgatgggtagaggcggcggaggaggcggaggaggaggggacgcgagcgcggcgctgtcgttcatctacaaggggtggagggaggtgcgggactcggcgagcgcggacctgcggctgatgcgtgcgcgggcggactcgctgcgcacgctcgccgaccgggagctggagcacctcctggtgtcggcgtccaccacggtggcggcgcccgcgccgcccgtcgcggcgggggcgcccatcgcggaggtggagttcgtgcgcaaccggatccagcccaagatctccgagctgcggcgccagtacgcggcgtccggggactgggagctcggcctcggcaggagggtgctcgagggctgggtggcgcctccgccgcccaggggcgccaccaccgcccgcgtcgacctctccgggatcaccgccatacgcaacgccctcgtccctgaggtcgccggcggcggcggggcgagcaccgcctggtggagcggggatgagatggaggaggaggaggagaaggagtgggaggtggtgaggatgattcgcggcggcctcaaggaattggagcgccgcagccagagcagcggcgagatcttggggggaatccctggccccagcgagctcgtcgagaaattcaagtccagactggtaatttccgccctaaacctaattgtttctcttatgcaagttctttgtatgaaaaaaaaaaacaagaattcgagacttggtacttgcatgacctgtatacaaagcaataacagtagaacaatctgttaatgagtggtgattgctaaaagggacttgctcgcattgcgagctcactctcatgccaatctcagatgctggccgaatgtaaaaattaattttaaaatgtaaggaaaaattatagctacaaaccctagtaagaaaatgtaggcaataatttatgattgctatcttcatttttagttcattcttacaaaagtataagcatgatttttagttctttgtgtgccaatgtatatgattcctaacttgattactatatatcttgattgaatgattatgtcatttggttcatccaattagaaaaaaaaaggtggtgttgtcacaagtgtttgttttaagagcaaaaggtgctatctggcttaatcacattctcacctatatttgttcccttggtgcagaaatcatttaacatggagcctcttggatccaaggtaactccacaaaccataaaattaatatgactataactatactgtttactgatagaacattcatttaccatctgaagacatccctttgcattatatgattacattatttcaaaacaattctggggaaatcaacgttcagtaaattttttccctctatgatatgatgaactgcagcaatctggtgtcaaggaatcctctgccttcaaaggcaccatgcctttgtcactgataggtgggcccatggttcatcgggcccacatgtcagtgacataggcacatacctttgaaggtagaggagcctgatccgtcaaggaacatgccatgagaagggaactagactttaaatctgtatagacactgttagatgataaatggattttcatccagtgcctcatttctcctgaaaagtgcctagtcttaaactctttagttatatactgcttagttatgccttaatatggaatgatagtgtgaataagtaggatgtttcataaaagaaagcaaccaacagtcctatcaaaagacactctatagccaaatttttgttctgaacttttgatgcttggttaacatcattgcatgtataatctttgagcataataatgcaggaagttcctcctcttgatctgactgaaattatggcaaatctagttaggcaatctgggccctttttggatcaacttggtctaaggagaggtatgcataaaaagcaacactgttgtatttcattccatttattaggtgatggccctcttatatgctattggtactatggtgcagaactacgtgacaaactagtggagacattgtatagcagacaaaatcattccctttcagcagattcatccttactcggagatgataactcaacggatgagcttgatttaagaattgctagtgtgctacaaagtactggttatcatacagatgatggtttatggaacgaaccttcaaaatacgaggtttcagacaataaaaggcatgttgcaatagtcaccacagcaagcctaccatggatgacaggaacagcagttaatccattgttccgggcagcatatttggcaagaaactcaaaacaggatgtcacactggtggtgccttggctttgcaagtcagatcaagaacttgtgtatccaaatagcatgaccttcagttcaccagaagagcaggaaacatatataaagaagtggctggaggaaaggcttgggtttgaatcaaacttcaagatatcattttatcctggcaaggtaactatcatacatttttttgtcaaggtgcatatcttgaataactcaactgatatgctgtatgccgtaccctgcagttctccaaagagcgccgtagcatcattcctgctggggatacatcacagttcatttcatcgagagaagctgatatagcaatattggaagaaccagagcatctgaactggtatcatcatgggaatcgttggactgacaagttcaatcatgtagttggcgtagttcatacgaattacctagaatatatcaagagagagaagaatggtgctcttcaagctttcctggtcaaacacatcaacaattgggtgaccagagcatactgcgataaggtgctgtatctagctcaacttgttctggtatcatctggatgcacttcagtttcagtattgctaatgaatggcttatgcaggttttacgtctgtctgcagcaactcaggatcttcctaagtctattatttgcaacgtccatggtgtaaatccaaagttccttaagattggagataaaataatggccgatagggagaatgggcagcaatcattttccaagggagcatattttctgggcaaaatggtatgggccaaaggttaccgggaactgttagatttgttggataaacgtaaaagcgacttgcaaggattcaagttggatgtatatggaagtggcgaggactcacaagaagtccaatctaccgccaagaaactgaacctgaatctaaacttttttaagggaagggaccatgcagatgactcactccatgggtatgtatcactcaagaaaaacagtgtgctctcaggttccatatcatttcatcatctgtgtttaccttttggtgatcactgatccagctgcctttcttttgtgctactttcaggtacaaggtattcatcaacccgagcatcagtgatgtcctgtgcacagcaacagcggaagctctcgcgatggggaagttcgtcatctgcgcggagcatccatcgaacgagttcttcatgtcgttcccgaactgcctgacgtacaggaccccggaggagttcgtcgccagggtgaacgaggccatggccagggaaccccagcctctcaccccggagcaaaggtacaacctgtcgtgggaggcagcaaccgagaggttcatggagtactcagacctcgacaaggttctcagccaacctgttacagaaggcgtgcacagaagcaagacgagaagaacaattcagagtaatctgtcggacgccatggatggaggattggcgtttgctcaccactgcctaactggtagcgaggttctcaggctggcaacgggagcgattcctggtacgcgcgactacgacaagcaacactgcgtggacatgggcctcctgccgcctcaagtgcagcaccctgtatatggttggtgaagtaaaccaaacctgcatctgcatgcactaagttactggatagtttgtaggtacatatgtactgtacatgacaagtcatgtagatctttgtaaagtctcgtactgtaacatgggtaactagtctaagctattgttgtcattgtattgtactgcttgtagtaatattgttttttgtcagtaaaattggagcttcaagtatatatggtacgttggtactaggttccttgtcaacatgaagctctcctttgtgcagacagcaagttaatggtatataccttttcaaagagtgggagaaaacctaactttgtaaatagaacatgtgatgaaaacaaggtgtggttggatgcctgaaaggatccagttagctactgatagttgtatggtgggtgttctaagaaatattaaggttagatttaaactgttttatcgaattttcaaattacttcttgttttaggtttgttctaagtccagggctggttctatgattttgagggccctaggtgaactcattgtgatgggacctctaagctatacataaaattttataatatatatgtagacactaattttacttgtaaaacgaaaacaaatatatccatatattaaatttaacatgtctggtaattatcaagaaattaagtcgactaaaataacaatatatttgtaccttggaactaatatcattattcattaacctaatgaagaatagaaccccatcatatccattgtttcccgtgaaaagatacttctttgggcatatcttgatgcaaaattatcaagaaacggtattaagatcaatagtgtccaagatatccttctcgattgagcacatagccaagccatttaacctttcttgcgatatagttaatctcaaatagttcttcaacaacttcaattttgagaaacttctttcagctgaagctactgtcacaggtacagtttacagaattcgataggcaactgaaatatttggatagcaatctgcatccataacaaattttagaatctcaagcacggacatcgaagaatctggcaaactcacttacagcaccttttaattctgaataaaaatcattgatctcaacatcggatgaggtactagactagtattaggtgttgactcccctccccccacaccatcatggcccccggcaatcacctcggctgcatagggccaagtcaaacatacgtatttaacgtcaacttttagaaattcatatactttagcatcataagatttatgttttagatttattatgagaaatgctttcataatacataattcacatattattaacctaccaaaacttttaaaaattagtggtgaaataacatctttttggcttgggacaaatctataacgttttacatatggaaaaaaggggtctgcgatctgtacagtctgtgtttagtttgacattgttcttgctgaatttgcatgttgtagtcaaccatagcgtatacaattaagcatatttctacgtcaacgcatctccacattagatggttgtgcaggttctacacggactcaatgattgcacactcaccaccgccacccaactataagtgatgatcgattaattaacacatcgccgacccactcaatgatgcctaaaagtcttgaggatttaatggagagaagattcagtagctagcctagcactgacgatatctccatatactatcatgcatcactctcacactctgcgaattaatcaacaaattaagcaacttactccatcggtcttatcaggaacagcgtgtcttactgcagattatattaattactactactacttttctgcagtagtagcattttgcatcactcatcatgtattaatccaacatggaatgggcttagctgcaacttgcaattaagcagcatctcccaagcttgtgcatgtgcatattgatgaaaattctgcattgaaatttcgtaagatttgcatggtttttgacttggttttgatccggatcatgtcacatcatgtgcggtggcgacgcgccggcgcctgcatcaagtgtatctagctgaatgttaccagatctgtgcagctagctagctttggagactggtttacctttcagagtgcataatatatctccaagataagagtcagagaacatcaaagcaaaataaaagggataatatgtaatgtggtacaactgaattgtcgccctgtacttatcctggttgagtacccatttaacaaggataaacatctgactgttttatcatgtctgtcgcctggtgattgattagatcatcttaactccaaatacgtctgagtttttaacaggtccttcggcacagaatcaataattggttttctaccgtctaagtcaggtttgatttgttcatatgtcattatattaattgatcccttcgatcataaaaacatatcattttggacattgatatggtcttcggaatataactttatccacaaatttatacggcggaacattaaaaaacccaataaaattatagcattacggaagtcaaatgtcacatgtagttttcattcatccaatccaaatatttaatcaaaattttaaagtttgacttaaaacatatccaaaacaacatgccttcaagaccgaagggagtatgaaacttagaattacctagctaaactagcaccttgaaccgctgtccatggatgcagatgcaggttatacactttgagtcagaaaccatcggagcagaggaaaggcctgagataagcatttgacgtggaggtttattttaggtttgacaaattgacgtactacaaacaatcatgaatatcatatttgttgtttcattcaaaccatcagatgtgtaacacttaattatagtgtaatttttatcgcctcttttgaggaccttttggttatgtacgagagaaaaggtcgcctaaaagaaaaaggaaaactatacacagagtgaacagctgatagattcggctgtatgattttctttttctcccctccaaatatgaagaaaaggtcttctataaaagaaacaaaactacgcaaagtgaacggctgatagattcggctgtgtaatttttttcgctccaaattaaatatgaagaaaaggtcatggccggttgagccaaatgtgactaactacacactcttaactttattttagtttgttctctctgattcagtaactccaatttccgattaacaatattttttacttggctgcttcaagtgatctagaagcaatcaatcaagaatggtggagagaaaaattcagatgcagaaaaggtatctgctaatttcttccggtggcattacggtcatgaagcaaaagtaaccagcacaccaaattattctaaaatccaatatagtactatcagtctaattaattgatagaaggtgatgccactgttcaattaatataatgcacaattcaatgaaattattccatgcatattgaataagaaaataaatgaaggacaagggatcagtgtctttgtacatgttatgagtcactaacttaattatgggagatgcctatcaaatcccaagttaagagcaaaatgttggatttttcatatttgagctatatatacaaaagaaaggctgggcaagattatgcataaacaggtagtctaaaacaaaatggcatgtaacaaagcacaacttaacagctttatatcatgttagtttttttccaaacaaaatcataattacgtcatattagtcagtgaatagttagacaggaccaaataaaagtaaaaatacatttcaagtctctaacttagctagatgaattaaggatccaaaactaacgcaagaatgcagcatccttccctatgcacagtgactctgtagtcctatctgaaactccacatcatgacacatgaatatcattttggtacgaatccacatgatcaacccaataatgtatcaagctctctatctaataggctttcgcatgaatgctatgggcctcaaaatagtgtctttaattagatgctttctcctcttatacagctttctacatgcattattcttgcttggtgtaagaaggttatactgtatcttaagcaacatgcaaactctcatattcaattttcccctccaaataacctagaatcatataattagatggagtaactataagattgttgataatgcccatatgaagcacatccctaaatttgaagtttaatgaataattatctttttgcgaccatctatatactggtattgttctgtctagcatagctgtacacaatccttttgtattcacagagggaagctgtgaccgacataacatcaaattaattaaacacttcatttgagcaggaacagcgtgacctattacaaataaatcaacaattattttttccctttggtgagcacattaatttgatacatgtaatctaggcaatgaaagatttatagtgtatttttgtacagaattaatgaaagatttacagtgtattttgtacattcagatcataaacaaattaaagaactaaaagtaatcacaaaatctaattaactactaagaggagtgcaaattaaagcatgtgctcctcttagcaattaataataattaatagatcggtggatggatgtgatggtgatgaaatgatcaggaggggtaagaagccttaaggtgagcttgcaagcatggcgagtccttccaaaccctagcgttcgccctgagcatctccctcgccctcgccctggcgcgctcgccgccgtccgcctgcagcaccagcagcagcttcgccaccacgccgacggcgagcatctcctgcagcacggccggcgtcgccgcgttcctcgcgacggcgtggagcgcgcgcacggcgctctcggtggccgccggcgacacccgcatcgccctcttggacaccacggcgagccccgccgggtgcgccaccagctccgacctcccctccgcgcacccgcacaggtggtcgatcgccaccaccgccagctccgccgcgcgccgccgcccgccgccgccctcctcgtcgaggaggagctccaccagcgccgccaccgcgccggcctccaccgccttcacgcggttccgcccccacgggcacagccggcacagcacgtgcagcgccgccttcaccgccttcgacgacacgccgtcggacaccacccggaccacctcctccaccagctcggggctcaccgccatcagccgctccggcggcatcgccgacgtcaccgccttcaggaggaggatggcatacgcgcgcgaacggtagctcgggcggcggagcacggaggcgagggtgtcgaggaagccgacgccattgtccttgccgaggacgcggcgcagggtgggctcggacggcttgagggagtagagcacgcccagggcctcctcctccggcgagctcgtcgacatgggggaatcgatcaccgagtcgaacaggtcgtcgtcgtccgagctggctgaggtggaggcggcggcatggctctggacgacgacggagacgaggaactcgacggcgccgggcgtggcctcgacgcagcgcttgttgcggtcgctctcggcggcgatggccttgatctcccggagcgcggcgagctgccgctgcctgccgccgccgccgagcatcgtcgtcgtcccctcgtcgacgagcgcggcgacgcggcaggagtcgacgggcgggcgcggggtggggaacctctcgacggcgtgcgcggcgcaccacgcctggatgagccgccgcagcgtgtggttgggcgtcgcctcccgctccgccggcgccagctgccgccgcgtcaccgggcacgtccccttccccccgtcgccgccgccgccgccgaacatccaccgctcgatgctgctccggtcgtaggtgatccccgtcgccagcgtcaccgggtccctcatgatctccagcgagatcgggcacaggaagtaggacggcacctccgccgccgcctcctccatgctcgctactaccacgagacgagttcgagctcgagttgatcgcgaaggagagagatcgatgggaggaagaagaagaagaggagtttgagttgaagggaatgaattggcgggagaggggagaagcgcgttggttttatagggcgaagagacggaggcgcgaaaaagtccacgcgcgcgggtaaaaaaggagggagacgaccagggttggtattaatcaatttaatttaatttaattacggcgatgaacagtgagcgttaatttaaattaattaatgtcgtgccggtttttttttccccgtcgcttcaccatgccgtgttggtgtgaaatgtgccgacacgtacgaacgcgtatgtgccgtgggaaattggataggtggcgcgagtaattaattgtacctgtttaaactaaattagtaattactatagctgtttaaattaaattagtttcggtaaattgggtggtaaaaacgggtggttgtgtcgggtcggcgtcggacggctcgtccgcgctgaccgagtgaccggacagcggctcaacggtttggcttttaatggatcccttcctctcttcttcttcttcttcttgttttttttttaactactattctgcttcttcttctttgtctttttgcttggtcttttcttttcttctaatcgcttacccttgaaagattccgttcctagccgatcgaattggctctaatttgaaaattctgccctgtttaatggtattcatttctttcacacattttttaattccccctgtggctatttcggttacttttgtgtggtggagagaacaaccactactgccactacgaatataatttcatgcttatggttgatcacaactgactaagcttgagaaacgcgtattaccacttttagcccgaggaggtgttgtacgtagaaaatatttttacactatatattatggtataataagtagtaaaatgtttttataaaacaaattgacaaccatatcatgacactgctggagaaacggtttttactcccggttatagcaaccgggatgagccaatcgtagtcctagttgagagaaccggtacttaaagttacatagcaaatgaaaaatacatgtgggatgtgggtttaaattcaagatctctcacctcagtcctcacgcacgtaaccatctcatcagtcctcacgtacgtaaccatctcacctactacacacatctaacttgaatagagatgttgtccttttgaactaactctagagacatctttagtctgagttggtgttaatttttagttcgggttggtgttaccaaccgggactaaagatcattcatctttatctttagtctaggttagtgttaccatcctagactacaaatcaatttttagtcccggtaacatcaacctagactaaaatgttttgagggacttgaaacacttttagtactggttcttaatctaaccaggacaattgtgattttgggtaacatgggaaaatatcagttcgccactagtgtgatgatatctataacaataaattattttttttgagagggtgcaactcaggacgccacgaacacaaacgcacacatacgcgtgcgcgttcttaacacacgctagaattgagattggaggcacaaggctaccgggataaccgaaattgatcccggggaaacggggaaaaaatcccctagtgagacacgcgagttacgattccagggatcgaactcgcgtggctgcttgctcacctagcgacgctagccatccgagcgacgctcggttccctaataataaattattttaaatagaaagagttacatattgggatatgatatgatgttttacatattctgatgatatctagtgatatgtgcgttgtgtggtataaaatttaattattcttttttatttaagtgcagatcaaatttagacttgtatatttatgtgtaaacttatagcatcactgaatctatccactatctctcttttttaaaagaaaatgtctataactatttaaaccgcatgtaagtaatagtaggtgtaattacattcctctactattttaaaagtggagtaaactttcttttatctcctactattgtcactgcgaagcacatccataagctccgtgtgagtaaccactagatccaatgtttgttttgcacagtaagcatgacaaatctaagtccgtattattgttagtaacaaaaactaattgaaaccgctcgtgtacgtgggacagtgtaaaaacatacgcacacttacgtgaacaaattagcgggatgaatagaacagtattacggtccgtatatatcttcttgccatgaccaagagccgtaataccaaacagccgtactccatgtgtaacacgtgcggttatatatggaacagtacacccaataacttgcacgtgtcactgtcacaaaacaacgcatagcggcttttagcctgcttgtcctgacctgcaccaaattaaggcgcacacgttggatttggatagtagtaattgcgatgaatgtgcaagcatatcagcatatatacataggccctgcttagttcaaaataataaaagttttattattttagaacacatttttttctaaaatggatctaaatgctagtaacaaaagttagcaatttagcatttgtcatttgggagtctacaatagcaaattttgttaaaaagtgcgttgggagtcgtgctctccctctactaacaccaactagaaaaacttcaatgccaaatcttttgtcaaaaaaatttaccacatcaaatctatctattatatactaaaagtacatgaaacatcgtacaaacgcttctaataaacatgtggcattcctacaaacattactaggccgccacattttcctttaaaaattagcaccaattaaatttatatatcttttataaaaaaaggcccccatcgtaacatgcaatacgtacgtacgtcccgtgcaattcttgcacgctcgtaggtacggaaggtccgattcccctgcccggcctttctttttttttatttcatggatttattcttttaattgttaatatttatgtatttatgtctactatatactttttaaaaaaggtccattaaattttcttaaaatactcttaaatcataaatggcgctctaataaattagagataaatcctaaaaattcaacatctaagcatcgttttttacttaaaccgataaacccttaattttagaaattagattatattgatcataaaataaattagaaaaagtgctcttaagtctcaactctcctgatctctatatacatacgtgcatgcatatttgatcgatcccaacagcaaactttgccgctgcaatagctgcacgctttggccccacaaaaataattaattagaagctaataatccaattttatttgaaattaaattaattttcaaagaaaatcctcgaagatttttgaaaaagaaaaaaactaactgcgtacaatcacggttgctagctagcaacgtagttccaggatgatagtatgcttatatagcaaaaaaaaaaaaaattgacgaaaatccagcaggagaggctcctactaaaatgcattggcaatagtagatatttacaatcccaaaaagttctgagagggagaaaagaagaaagaagaaaatagaacttataagaacaaattacagattatctagtcatgatttctagggtggtctgtctgagctttaaccctatgcaaaagtagggtaaaaactatatagcgaaaatcaagaaaatgccattaaatttgtgaaaaaaaccacaaagatttaaatttgagcaagagaagtgttggcctctggttttgaacaccgaaaatgtcatgtgtttagctgtattaatccctggatcagtaacacattcataaccaagcaatacatacaatgaaatgaatttaggctaaaagagcgtaatgcctttacaagtaccactagggtcttgccctatcacataacaatagtggaaaacaaaaatatatataatattattttggaccatattttaaccatttgcatcatatctacaaagaaaatgggcagcatagattataatatcatatatcactttgcaaacatgtataactaaattagctctgcaatgcctgaaaacagagtttgcaccattatattgtttaccattaagttaacaaaacatgatctatattaactatatttcaacttgtaaaagaaaattatattttagctcgtatttttattctttccatgtaatccaaacaaacataaaaattgtgaacaagatgacaatatatagcatatcactatatatccattatcaattcataaatacacacaactaaattagatttatgatggcaataagtaacatgtcatatgttgacgctttacatggcattcgagaattatgacaaatcatgaaattttatttaatgatatggattataaatttgattatcacgtaggatccagtctattcggcccatgtcagttcataattatacatgactgaattagatttacatgctcgcatcttggcactctacatggcatgggagaattataagaaatcatgaaattgttttttaaggttttaatgatatggattatatcatcatataaatatgcctaaaatatagtttccagtctattcgacgtatacgggaataacctaaaatatcaatcttatttaccaccatgtataagttatatgttttggcgattatattatgccctaaataataactaaaagaacagagagagtacacattatttttttcttctttgatttctaatgaatatgcatgatgtgtgggaactttatactaactttagttaattaggaaacacaaataatacaaaacttatatatgagaattcatgcaataaaaagaaactttataataagaattgccctaatacaagcatacgttagtctttgacacttaaacatttaaaaatactctacacatactaattaaaaatacactagcatataattgcgctcttatttcaagtagaattcatttcaatgaaaataagaaagcgtgtgaaaaaggacaagtaaacagaattttatctttaattagattaaacaattctatttgccattttttatagaaatatcctcaattaatatatctaaaatccataaatacatttataagagaaaaaaattgttacttaaagtatatgaacccaaaaacaagatatgctaaatattccaaaagtaatcacacatattacaaataagtttcattggaacaaactccatgttgcgacaatatcttctcatatacaacggtccaagtaattttagttgagaaatgtggcaaggataactatgagaatatataagaaacattcaaagcaatctcaaatacattattgacaaaaacaagtttagagttgaatcaaagccacacataaattaaagcgataacaaataaggtgcccgcgcatatgcgcgggctaccttcctacactggtggagaagtgctttttagtcccggttcataaccccccctttagtcccggttgtccaatccggactacgaatccgggactaaatatcgctatctttagtcccgggtgaaataaccggcactaaagatcaatctttagtcccggttgataacaccaaccgggactaaatatagggatcttaccaaccgggactaaagagggaataacagcagtacagatggtcctctttctttttttttcttttttattttctcctgaatcaagtggcatgcatattcccaaatcccaaatcaaagtaacatcccaaatccacatcacaaatctttaagttacttatacacataaatcaaatacatcgcaaatcctaaaaaaaattacacaaatcaaattacatcacaagttctacaaaattcatcgcaaatacgtcacaagttcacatcgtatacaaatcaaatacatcacaggatcatatgcaataaatcacgaattcttaaagaaaaaggaaccacagaggtgccgctcggccggccgctgccgcctcctctccgcgccagccggccaccgccgcgcggcgcgccgcccgccaccgcgcaggccgccgccacgtcggccgcgccgcccgccacccgaccggtccgctcgatctcgctcgatccaaaaagaagagaggaaggaagaaagagataaggcagaagttagagaggaagaaagaaagagatagagtttgttgtgtggacgagagaagaggataaataatagggattatatagtacgtgttgatttttattcccggttagtaacaccaaccaggactaaagttagatctttagtcccggttggtgttacaaaccaggactaaagatcctaggcgcctaatatagtctgacatggtaccaaccgggactaaaaatcatatttagtctcggttggtatgatttttagcacaaaccgggaataaagatcatctaggactaaaaaatcatttttagtcctgatttttaatggaaccgggactattatagatttgggttgaccgatcaaatatggtttctacaccagtgcaaattgatctaaacaggcccatagccacattcatatactctctctctccgtgtcttaatgcatgataatattgttaacatttgaacaaatgtttaatcatttgacttatttaaaaaatatatatattttttaaaaatatgataaagtaactaacaataaagtaaataataattatatttttagtgagatgtgttttacaaattaattaacagcgtcatctactttaaaagaacagaagagagggagaagaatatactagttcgttaatttctcgccatcacgagatgagcttaattaagctatagtacccgtaccagcatttgcatgcatcgtccaatgaatcagccgcttccaaaccaaatccaaagcgaaggtgccaagcaaagcgcacgcacgcacgtttcgttaaacaaggccagtggattaggacgcgagtgacggcagaagtgcgggcggtggggcccgcatgtcggcgtcatttgaccggaccgaaaggggccggagttttttcaacgcacgcgcgcccgcatgcatgttggtgcgaagtgcgtctcctactattaattcgtcacgtgccgtcgctgaccgtttaccaattaattaatgctgatcgatcagttaattactccttccgttccatgatataagagattttgagtttttccttgcactgtttgatcactcgtcttattcaaaaaattttgaaattattatttattttttatgacttactttattattcaaagtactttaagcacaacttttattttttatatttgcataaattttttaaataacacgagtggtcaaacaatacaaacaaaaactacggagagagtagtttggaggtacataggatcataggagtatgtcatcgcttcctcccgctgatgtatccggatcctctgcatactttgttcatactcctcttaacgggtcacttatcaatgctgcataataaaagagcatctccaacatactccctctgtttcatattacaagattttctagcattgccaatatttatatatatattaatgaatctagacacatatttattagcatatgtatgaatataaataatgctagaaagtgttataacgtttcagatataacagatataggctcccatcggttgccattttacccaaaatggcttatttggcttattagaaaattaaaattaatttataagtaaaacttttgtagatttgttcgtagcgacttaaaagctaacattaacaaaaattacgttaaaagcattttaaaatcaacttcaaaatcaagtttaaaaattcaaattttggcttattctttggctgtttaggccaaacgatggggctgatagtagttatcttcgccgtccctccgccgcccctttgttgtggcctcgtccgctacagcagttgcttgttgtcccttcgttgtggcccctgtccactgcggcgatcaccgccgtacctccgctgcggctcctatccgcttttgccgtcattcgctgcgacggtcgcccatgtattaaattctttttacaaaacaatgttcttttaactgtttgatttaactaaatgaaagtgacagggaattatgactaacgctaaacaagtactccggtacgttgtcaacattgaactattatgacctagctttgccgaccaggccagctctcgaatcttgatcggcttttgttatatattaactgttaaatgctaaattattcgaggatgtaacgaaccattctaaactagactgctgaagacggaatcttgttcttgtacacggtacacctgaacttttatacgtacgcaacctcgttacgccatacactaccacataatagggattcggtgccggttttcctaaccggcactacaaagacggcacaaatcacaacagattaaaggtggtggtttcaaaatcgacaccttcaaggcgcacacaagccaagaaaaatcggcttgatgcattgagccgatgcatcaagccatcaaactgatcccaaataatactcaaatcccaaaattttgcatcaaatccatgaacacatctagatcacattcaacaaatcaaaagaggaaataatacaaacacaaggagggaaggacaagaagggaggggaagaaatcgatccgtgggcctccagccacctgccgccgccgcatcccccttccttccgccacctccctccctcccccccagttggcccgcccctccatgggatctggcagagggaggagaggggaggtcgtggccgccgcctccgccgaccagacgcccgccgtggcggaggggagggcgtggccgccgctgctgcctccgccggccagccaccgggcgagagagaagggagggagagagagggaagggatggatagaagacgctcacgtgagtggatggatcgaagtcatcgaaccttatctcctcgttctggtggggcccgtcgactcatcgatttgccggctcggctcaattcgtaggtgtcggttttttataaaaattcagcatattataggtgtcagcttttaattaatcgacacttctaatatattaaaggtgccggtcttttttaagaaaaccgacacctgtagaatagatgtcgatacttatttagaactggcacctataattgcttaaaggtgcctttttttggatttcaacccgcggaagttggaaaatggttataggtgatggttttagcacttccggcacctatagtgccgagatctatttgatgttttgtagtagtgatagctaatttagccaaaaaaatttccaaaagtaagacacgcatgctggtgtagaggaaagtattattggtaattaaacccagaaaaaaatgcaaataatctaattactagataatattataagtaacatatatagacaactagaaatgcatatcgtcttgactcctgtgatgctgtgcagtttgggcaggtgtattaggtgcccccaattacagggccataaacatctctgttgatcctcaaattctatcatttgattgtattttgtctaatctctttctatatacttataatatggtagagacttaagaatacccatggccgacagagaacgatgttggttacaagaactaaaggtgaaaatggtgtcggtaattcctgacctaacggtttttatattttacccatttttttaggaacggaacaaaaacagaaacggaaatgataagaaaaaaatgaaaatagaaaccaaaatgatctcgctattctacaaactgttacattgttttatgatattttcttggaatttatcattttattactccaacacgtggtcctcgtctttagtcggcccatatatcatagtagagactcatcaattgtattactccctccatcccataatataaggcatggtcaaacttgacacagtcttcaaaactaatctttgacttataatttctcatatattataaggtttattgcaacaaaattataacatgataaagtaaatttaaatgtcaatctaatgatattaattttagcaaataaaatttaatttatattataataattattggtcaaatatttttaaagctgaatcttgaaatatgtgtacgccttatattatgggatagagggagtactaaactttgagcacgtaggaaaacataggcatatctcggatgaccactcaaaattaatgtagccaaagctcatgtatataaataaaaagaaaaaaaatgtaggggggagaacaattatttttcttttgcacgagtgacatttagcaattcgcttattaaacttttgatcaattatatatttctgttgtatgttatattatgtttacagtattttaaaaaatatgtaagtggaccacccatatctaaatttctagacatgttaccgtagttaaagggaagccaatttagataatgcaagtatgaattaatgtggtcatattatatagtcatgtaaagctatatctgtgattttatacttcagaatttatgacatgagtatatgcttttatctatgcctgtctgaaaagttatgttttacgaaaattgcaaaaaccacatttagttcaaatttggcatttcattccatgtcattatgttacaaatgctcatcctcctacttaattttgttgcaaaggaacaccccattacgcacgtgtttagttgaatccaccgtagactaagctagttgagctaatcttgtccaagtgcttgattagacttacttttcatctttcattatttttttatgcatataacggaactcaatgagataacgttttagctctcattagtaattttatttatggaatatccaagaaaagtgtcaaggctatactccgtatttaattttggaagagaccacattaacggctcacaattaaaaaaaacatgttgattcggttaagccgtgcgcacgggggtacgtggtttctactttctacacaaaattgagtagggttgagtatttacaacaaaataacttatatgctaaaatgtcaaacttcaaatgacttataggatggtttttcaaattttcgaaatgttttttttttagtttttagatattgttttctgtttccggctctactctttccaatttcagaggggaaaaaatatgctaatggaattggtggaccgtttgttcaaataccgattttatattcctgatccgaactgttgttcgaagtgggtgtgcgaggggaaacataatgtgcaattaagcacgtggaaagtgtgtgcgatggttggacaagtactgacacatatggatgcattcgcctttttgggggaattgggatttctggtgtagtgttgtaggcgtagattgtacactctacgtgggaagtaacgtcgtatacgtaccagccggggtacgcacatcggggcctctcacctcacatgtgcatgggccggcccagccggactcccgcgagcatgggcctaatgctgatggactctaccagtttgccactagcccactactccatctactactattcacgtatggaaaaagtccactctgactcccttaaaagtcggccgaatctaattcgtgccctttaaccacaaaaccgaatagaacgactctctgaaatattgaaaccggtgtaatttgactctcttaatggttttcgagggtggtttcgcgcagacgtggcgcttacgtgacggtgttgacttgtcttcgtcccacgtggcgttaacattgcgcttatgtaatattagaattaaaaatagatatgtgggactcatttgtcatttacacacaataaatacaatggacccactgactgtggggcccacatggtcatcttatctccaacccttcttctttctccctctctccccccttatttctctctctctctctctctcttcccgtcggccgtctgcaaggaatgggattggagcggcggtggcgggcggtggagcagcggacgggagccggagtggtggcgtcgggagggagggtgggtagcgtttggggtggtgctggcgcggatggaggcgaaaggggaggcggcagcggcagggaagacggctgtgatggtagcggcggcgggcaggagggtggacgagagaggatggggcggcgaccatccatgcaacggagacggctcgatgacgaccccgcgacgaccggggacgcccccgcgatagaaacaactcggcaatgaccttgcgacgctaacgggcggagggagagcggtggcggcgtggcactctagatccggcctccacgtgccgctcaccgtggcggaggagccgtcggcggccccgtgaagatccgcgatggagacgacatcacggccaccggcgacgggagagaagctagcgggagagggagagagaggccacctctcgctgtcgtccaccccacgtgctgctcgccgtggttgaggagccgtcggcccaccctcgcgccgtcggcggccccgcgaagatccgcgacggcgacgatctcgcggccggggtgggggacggggagaggtcgtcagcgccggcgtccggctgcgacctggcatggatcgccattgatgtcgctgctgtcggagagagaggaaggaggaagaaaggttggagagaggatgaccatgtgggccccacatgtcagtgggtcccattgtatttttatgtgtgaatgaaaatgggtcccacatatatatatttttatttctaatgtcatataagcgccacgtcaacgccacgtgtgatgaagacccagtcaacaccgccacgtcagcgaaaccactctccaaaaccactaagtgagtcaaattacaccggtttcaatattttggcgagttgttctatccggttttgtggttaaggggcacgaattagattcggccgacttttaagggagtcgaagtggaccttttccttcatgtatcttttcaaattcaccgtactaaggtgcatcgtacctgtaataggttggaaggagtatggtagtagcactagcagccccatcgttttgcttattcgtggaataagccaaacgacatatttgcaaacaggatgtaatttgtgagtaaaatgtttatatatattcttagcaatctaaaagcaaatgctgaaaaataaatttcgatgaaaaaccccaaaatcaattccaaattttaggtggataattcaaattttggctgatgcggcataagcataagcgaaaagacgagccctcctaataacgatccggctcagaccccaacagttcttaggcacacccactcggggaaaggtctaatctccctaaaaaactagtccaataggagaagggtggctctcccttttaaggtggcttcctcctcccaagctaagcaagtgggattattcagaggctcactcggtcgccgcctgacttttgcgtctttgtcagcgggtaatagtggagaatgttctcatcacctgctccatctgttttagcactaacatttctatcactccgggatgtgtatagcccgccatccgagtagagtactaagagcttattcagttccttatcattctcaaccatttcaaatactatctccttctccgtaatatgtttgacgttgactagttcaattttgtgctaaccaacatcaaagaaaaaaaaataaaggcagtaatttggtaagttagcaaattaaatatatcattaacaacacgaccttatctattttagctaattccatagctttctgctcacaaaactactgccaacatttgacaacactaccatcttcattttaccttatcaaaatttactaatgccaaaatttaggattatcaaagattaataaagttttgttcatcaataaagtgaaaaagccctatgaaagctaagagtatatcaggtttgagacgatttgtttggccaatcgatccagataatgttttccatatcttagtgcggatctcagtagttttcctctttttttttccttttgaaaaggcaagaaatttgccttgtcgatctatattgagcagatctcaataatgtcactgtggaatttgtgatcgtaacaagaggagaaaataattgcgactacaaattaatgtaattaactgtgagaaaaattaacgcaaggagaaggcgtcttgttgactttagcttaaacagtgtttagtccccattgaaccgccagtagtatattcgacgcgccaccatcgtggtgattttagcagataaaaaaaagaacacgataaaattaatttccatgctcctgcggctggtctattgcagggagcatcattcctcggatacagttgctgttgccttgttgggtacagttgttgtaccacctgagttttttttcagtttgtctcgtacagtactgtgatcatattcttgtgctagacagctagagcatgactctgctgccattcattgaattctaaatagaatttgaggtcgcctgagtcactttaattggttgactctttttcataattgctaaaattataagtacaagaatctatataaatttattaaaagccaaaagttaaaattcaatactattttggattaaaatctgaaacaaattcaagccatgcaaattcatatatctttgcttccgtgcaaaaaaaaagtataaacatcatttgagaatgtaaaaatttccaaaagttttactcacttttctccattttctggctgtgttttccccccttctttccaactctccttcatcttttttcgcgctcatacttttcaaactgctaaatggttacactatttacaaaattttttttatagaaaagttgttttaaaaaatcatattaatcaatttttaagtttttaggctaatacttaattaatcatgtgttaatggaaaacaccgttttccgtgtggggagttggagactcagcctttgatggcaatccaatgattcttgtcccttgtcccttttttttcttattatataaaaggtcgaacaacatatttaaatattcaaaaattacaaaattacataaaataaataaaatttacaaaaccacatgaaaaatattcaaacttagataaaaataaagtaaagacatatataacaacaaagctatagctaaaaagaagtaaaattgtgcattgcatactactgcgattttagcctcaggaatatgcaatttcaagtgactaggaatttacaaatttcgagacacttaaaatctagcaatacctttaaaatctatctatatctatcgatcaatctatgtacacgtcttagattttggaaaagaacatgagaggtagtagtggcctttaattattcataattgctatatatatattctctccttttagtaacagggcgcgggacctgattaaccaacattagcaatttcagatgaatagtactccatccgtttcacacggtaagttattttaacattttccacattcatattgatgctaatgaagataagtcattttaccatttttcacatttatattgatgctaataaagatttattagcatcaatataaatatgaaaaatgttagaatgacttacgttgtgaaacggatgaagtagcaatgaaaccgtgatagcagcacgcgtgcttgctgtcacggagcagcgacggcgcacggggtggttgggaaggtggttagaatttttatacatgaatcggatcggatggtcctggcctgctggattttgcatggagcagccacggatgcacagaccgattcgctgtaggttagtactactatagtactacgtgcttaaaggagaaacagaaaagatacataggatcacttttaaaagcgactgtttttgtcctatttgcccgttaatcctgctcgacagagctgttgcttattttgttaattttattggatttattgttaggattagttggaactagattcttttttatgttttggtagagaaaaagcctacaaagattgaattacggttgacacggtagcatgttctacgctaaaacatgccgagcacaccgtgtgcgctccactttggtgcataaggacgtgattctacaaatatattggaaacttgtcatcaacaaaccagaacttttggtatagataggtttcgtcgaacgctcatcttggaggaacatcatcaaggcaagtgtgtgctggtgtaccctaagggcagtagcagtgcagcgcacgtatagcgtgtctctgcccacctgaagcagcgaaaacagattcagagtcacgagcttcacaacgcaagcgcgaggaaatcacgtctccgctgtgatgcgagggaaccgcgactccggagcaacgaactccacagcacacgcgcccctcaagtttctgcgttgcgtgccctcgatgcgacgaaagaactcgcggtttagataagatgcgagtggctacgcaaaggcgcgagtgaaggtgacacgtccgcatgagtctgacctggtgcggtaaggcaactcgccaggtcaacgcattgtgaagggccttaggggttgtttggttggttgccacactttagttatgccacaattttttaggtatatgtttattttactaccgtaattgtgtcgtgccatactttcttagtcatgggacccacatgccatattcttaaatttggagctaagcatgccacacttgtggacaactatttccaagccacacttgtgccaacatacctcaactaggctaaacttagttatgtcaatgttaggcatcaaccaaacatcccatcacccaataaaacttagggcatatttgggagggggtggttctcgttgttgcattttttttccaaaatactcaaaacgatctagggtgaaaaaggttataataaactagaagccaggagttatgtatcaaccaactatttattaaaatcttaactttcctaaacaagaccttaaattgttatctttcatcgtagaactgaaaacaatttaggattagaaaaaaaaaagatgagagagaaataaataggtagaagtgatatattattatgatgattgggtatgaacggtttcaatcaggtttgacccccccccaaatatttgtatgaaggatgatcttgtttctatatatttttggtgggtctaaggataaagcagactactggttgcatgagccttggcgcccgtgcatcaccatcaattatttacgtagtactcgacaacttccttctctctcctccaccttagacttttctaccgtctataggttaatagatggctttggtaactttattgcacttgtcctaactgaaaccaaatttagttttttctatataagggtattattttactcggcatgtaaatccaattgaatatatgcatttttttaaatcaacttgaaatcaacttcagttgaagagctgaagatattagatacccaaacaggatgcttgtggaatggcatatagtagttagatgagccgtgagcggtaacaaaaattggaaaaatttggaaaccagccgacgcagcggcagcttacacgttgtctttcgctgacgatgatgtgttagtagtagcactgtagcagccaagcaggagcaggcaggagtagtagtgatcacggtgactcggaaacgcgccgcacaagccatcccaaaatctcctccaatttgcttggctttggaaaaaaacccaattaaattataccattattccataatcagcagcggtgacggcttggcttagcttaactttggctttagtactcatctcctactaagctcgtggacttttccttctctcgtcaacagcagcgcacctcacctccgccgctcgcctcgcctcgcctcgcctcgccttcctcctcccatcctcaccccgttgaatttctcccacctccgatttcttcttcctcgttgaaccattccccacccttcttctcctcctcatcctcctctccgcgccccgcctctgcggcgaggtaggtgttcgatcggtcggatggacgcgtcggatggccgcccgtcgccgcggagccggcagctgcagggcccgcgcccgccgcggctggccgtcagcaaggactcccacaaggtcaggaagccgcccgtcgtgccgcagccgcgcgggggcggcggggtggtggctgggccgtcgcggccgcagcagcagcagcagccgcgggcgccggtcatcatctacgacgcctcgccgaaggttattcacaccaggcccagcgagttcatggcgctcgtccagcgcctcactggccctggctccgccgccgtggcggcggtggctgctcccgtggccgctggcttccacaccgaggcgtcgtcgtcgtcgtccgcctccgcctccgcgctgccgccgcagttccagctgccgcaggagttcatgctctccccgaccgccgcgctctcccccgccgcgaggtacgccgccatcgagaggtccgtacggccgcttccccccaccaccgcgcactactacaccgccgacgccgacgaccccatcctgctcgacgtcgacggcgacgccgccgcctttgcggcggccctcggccccgcccgcccgagcatcctctccccggtgccctccgcgctgccgcccgcggcgtcgtcggggctcttctccccgctcgaccaggcctccctctcctggctcagcgacctcagccccttcctccactccgccggcgccgccgccgcacccccgccgccgttcgcgccgagcccccgcagcctgctgctgtccacgcccaccatgccgtcgccggcgaccttctccgtcatggaattcttcagcagcaacttcccggacctgtaaactaatcccagctcacctcatttgattactccctctcgcgtccgtgtcacccccggggttaattactttaatccttaattaatcttttaccgcgtgcgccggcgaggttaaaaagtaaaaaatcacattgccgcgccggtgaggtaacttccagcgaggcgggcgggttggcgagatggcacggtcgttcgattttttaatggaggaaaaagaaaacaatattctcagatattttctcctgtgggtgaggggaagttggcttggctaagctagcattaattgttggagtaggtgaatttctcttctcatacttgcttcctctcctactgttaatgtattgataatttgatattataatcagctttaggtaggctaacctctcgttggctttatttttcttcctctttttcttcttttcgttctgctgattgtgtaacttgtaaacgaaggagatgattgattggttgatttaatgctagtttcatttgttcattctttattaccctgagcccttcagacttggtcatgtatggttgagatgatttaattgccgatgattttacgtctcggtttaccgccggtgtctacctggctttttgtctggagaattctttggtacataaacatgtgtctgatcgatgcttaaatgttgaaagccttgttttgatggtaacaggaaaaaaataagcatcatgttttagaactagattagtataagagaaaataagctagacagatttcgattactacttgcgattctctagttttgaggcaactaaaatatttgaagatatatcaatcccttcaaaggtgatgtaccacaaaactattgatttaaaaataaatttatcataaaactatgtatttaaggtggagtatcgaaaaactatagatttattaacaaaattatcacaaaactatgaattttggagtttaaatccttagcgctagtgttatatttgagttataaatatctaagttttggtattaaattgatactaaacctatacttttgtgataactttgttactaaatttataattttacgatactctactttaaatctataggtctccgagaaatttattgttaaatttataattttgtgatacatcacatcaccttaaatatatagttttgtgataatttagtcaaagtatctgtagttttctgaaatttagtcttatttgttttatagaggggaaagttcattttatattcatgaactttcataaaagtctaaaaatcattccttaccttttaaatcagacaatatttatccccgaaatttcagtacattcacttttcattctatcaccagattcaaagtgattttggatgacatgtaatacatattatcttttgcgagctatataaaaaataattggctggtggaaaaataattctatagtactccctccgtttcataatgtaagccattctagcatttcccatattcatattgatgttaatgaatctagatagatatatatgtctagattcattaatatcaatatgaatgtggaaaatgttagaatgacttacattgtgaaacggatgaagtatgttgtttgtaatgaccttcattttggaacatatctaatttatttcattttaatatacacaaatgtccaattgaaaattttcaaagatatttttatgtaaattataaaagttaaaaatccaaacataattctagcttttaaaattctgaaaacattaattaaaattttagatttctccaaaaatagttacaaaataaaaaaaacttagaagtacattaatttggtccattatgatttgattttaattttatccaaatatatgatttcattcaaaatttagctcttttttctaaaggaaaaaaaaccatactacctctattttttaatagatgacaccattgacttttggtacacgttttatcattcgtcttattaaagaatttatgtaattataattattttttgtgattttttttatcgctaaatatattttaagcatgatttatatctcatatatttgcataaatttttctaataagatgaatgatcaaacatgtatctaaaagtcaacagtgtaatccattaaaaaacaaagggaatatgatatgttgcttgcagaaaaaaatcgttttaaatgctccgtgcaagataagataatttattgagatttttttaggatttttatagatgtttataattcatataattgtatcacattgtcacatctaggccatgtcatccaaaaccactttaatctagtctaaggatgaaaagtgattttttttttagataatggatgtaaagtaaatggtatggccagttcatgaatgaataataccagattttaaagtctagggatgaattttatactttcctgaaaattcaaggatgtaaattttcttttactaaaaatgcgaacaagttttacaactaaaattgcatctgaaacagttttgtgcaaatgtcctgctttgtgaatacgggtggcacgagctataagcctataacaatattgaaagcataaaccacatggcattgcacctcgagttaccaagtgcatgatttttctttaagactttattttgcataggtacaaaggtaacatgtagtagttcgtctataacaaaaggaaaaaacaatttcacactaacttgcgtgaaaagtacacatgaaaatcatccataattaaactttaaaaccaagcattatttcttgataaacttagcaaaccatataaaacacccctaacctaatcccttctttctataaaactaatacacactaaatgcctaaagctcaatatgcaagcatactatttattagcactcctaaaaactatatgcaagaatgccacatcaatccattaaatccattaagtatacaaagctcagcatgcaatcatgataatggggatttatatacaaaatatatgataatgtggatttatatatgccttatattattacaatacaattcatgatttattttttcaaacgtcattgtgtattgttataatatattaacactatttccatgcgcaatatgggtatcgttatagttagacagttatagttagccaattcgcatatttctacttcactcaagtttttttttcctgaaaatagattcaggtaacaatacataataattatatgctatcttatcatgcatactaaaacaaaacacacatattaaacaataatcacacattaaacaataatttgaattgtatccagaaaacatgttgttatgcgcacaatatgtaacaatgctatgtgtgattgtgaggtggagcaaagggaggtgaatggataactaataaatgattacattggatgaataagtagcttattgatccaacggttattatctttgcacaaatatgatctaatagcttaaaactactaatgatatggcttcttatatatcttgctttataagaataaatgtctcttagtgggtaccaattatatatgaagataggatctataagatctcccttcaagagatttttgccaaatcaaaaagatattggtagatgtcaacatgtttagagtttatttcgggaaactttttgtagctatagcttctcctctaaacaaaagctcctagcttgtttagcttttttttttcctaaattttcagaatccagaaaatatactggaagccaaaaaaaaaaattggttggttaccccaacttcttcatacctttaccagctgtttttcataataaaaaggtctactagacatgccctacctattgtgtaatttcaacataaatatataacatatcatcagtgtatgtatttcttaggctcagttgaaacacgtaatttctaataaggatttaaatttctcataaggatttaaatttctttgttttacctagctcacagaaaaactcataagaatttaaatttctctaaaattcctttaatttttttttcaatccaaaagattttccttacatttcgcaagtcgaagaacaaatttgaaaccaaaacatgtaaggagaacaaaataaaaaaaaaatcttagaacttggaagcgtaaaaggggagtgagatattttggacaggtttggcactatcccatccgttatccccttggctttcctttccctccctccctttcgcctcgctccgggccactccctctccctcctctctccgccgccgccgccgccgtgcgccatggtggcgctcgcctccctctcgtccctctccccctgcgggctcgcgcgccgccgctcggcctcctcagccgcctctatctcatgctgcgcggccccgcccccgccctccgcgaaaggtatatacgtatacatgccatggcttgcttacatctctctctcgtttcttactccatcccgccgacgctgattcttcgtgggagggagatgatgtggaaggaatcggaaaaatggcaggccatgcacgtcccccgtgacgaactttgtactccttatcgtcccaatttcacttgcgagtctctgtgattgcggacctcgccggtagccgccggtcgtcacctcctccccatccttgtcaagcgcgccctaggacctattacccctgaactagtaccactcgtttaggggtttagtgtcaaatttttgttggggtttagtgtccaaaatgtttggaggtttaagtgaatctccccaagccctatgttaggttggttttgttaatttgcggaatcatggatcgctttcgtatagttgtgttgtatgaggtcgcgtattgctattgagaatcatctgtcactgcaaatcgtctccatttttattatgtcaaggtgattttgttggatggagtctcccagtctgtaacacaaaagcatagatagttagaacacatggtttcagccagtgggggaatccagtaaaaataactgggtttctatgcatattataacacgtcgagtactcctattatcaagttgcaactattatgagctaaaacacctaaaaatggaagtctcacccggtgtcctgtgcaccagggtgatactatgtactagttcagtcccagtattcaactgtttacaaatctgccacagttacgcgaaatggaaaattcttctctgcttagacactcacaagtgaagggcatttcttcctaatgtctacaggatctcaagaatccagaactccacgtagaagggtgaggaaaactgagggtgccaccaagagcctggaagattcagtcaagcgaaagatggagcagttttatgaaggattggatggtccacctctccgagtccttccaataggtggccttggagaaatcggcatgaattgcatgctcgtagggaactatgaccgttacatattgatagatgcaggggtcatgtttccagagtatgtattctgtttctgttgcttgctgctgcttacattactgtttgattcacatcttttttgtctgtaattttcatgtgtctatttgcaactttgcattttgtgaatagcgtttattttggcaaaacatgtatacaagtgaggactttgatagataactgctcacttattcttctacactgtggcatgatcatgatcgcttggcatttatagactttgatagagttcctgcacacattttcctgtctacgtgtatgctaatttgtttttcctgtctactgctatattttgactgaagtgaattcaatttaaacttgtgtcagctttgatgagttcggtgtgcaaaagattatcccagacacaacattcatcaagaaatggagtcacaaaatcgaagctgttattataacgcatggccatgaagatcacatcggtgcgttgccctgggtaaatgattcttctgttactcatacatcattcatcgttactgcttggctatgactgcacaacaaatgccaaaaaggcttcggtcacatgcaactaacaacctctacagctatttgagacacaaatgattgtgcagaagatggtagcagagtgccatactgtaaattttaacaacatgagtcaactgctgcaaaaaagtcagaaaaaagataactgatttgaaggatataaccttgttcttgtgtcaaagctaacattctctaaaactcaaagctctcagcatatctaagtcagtaacaagaaactttcttcatttaaacttattggggctcatgaaagatgcattcatttctctctaacaagatacgcgttcattcttatgttttccattgtatttgctgtccacaggtaatcccagcgctggattcaagcacaccgattttcgcatcatcttttaccatggaggtaacagtcagttcttttgactatgcatgttctgcattgttggccgttattattacatataatttgtttcgttaatcttcagcagtactaagatgtagtttttcatatttggcagctaataaagaggcgtttgaaggagtttggaatttttctctcgtccaggcttaaggtttttagagtaaggaagagatttcaggctgggccatttgaggtggagcccctccgtgtaactcattcaattccggactgctgtggcttagtgcttcgttgtgctgatggcataattttccatactggtgactggaaagtaagttatataaggaatgattgcatactcaatttctttaattttggtgccccttttaactaatttttcaataaaagattgacgaatcaccagtggatggaaaaatatttgatcggcaagcattggaagagctctccaaagaaggcgttacacttgtaagtttatacaatatcagccatgcatccggaccagtacttttcaatggtttaagttattgtcctacgttgcaccttatactccccccatccatgaatgttgtcactcacttttgttcacaaaatacttgatatttcatgtttcccagtgcatgtttttccgttttctatttttttttctctctttttcgttgtcctttatcacatatttggtgggtccataatttattggttagtttggaagggcattatgggcatatcatataaattcaaatggtttcctatgtgtgccatggtcagaagtgacaaataaacgtggacgaagagagtaccatgtaggacggaaagaaatgatgatgcagtgtcacatattaaaagaaactattgtcagatcacttctgtactggcacgccgagctatttgttgatatgttgctaacattatttctcttctctttctggttatttttgatgcaagatgatgagtgattctacaaatgttctatcccctggaaggtccatcagcgaatctgttgttgctggttcattgttgcgacatatttcagaagcaaaaggaagagtaattaccacacagtttgcttccaatatacatcgtattgggagcatcaaagctgctgcagacttaactggtcgaaagctggtagaaattgcttcaacatatagtgcaactctaccttgtcttgtttgacttggatgatgtttttaatagtttgtacttttgataaactggaacaggtatttgttggaatgtcactcaggacttaccttgatgctgctttcagggatggaaagtcaccgattgatccatcaaccttggtatgcaataatattattagagttattcaatagtctttgtgtggaattgctacactattttgttgtaattggaacttaatgatgcaatatatggaacaatgtcttttactgtcctggtgatctatgcaattggcatcgagataagcacatccttaacaatttgtttccattaccatttttatagctatcgacattgcatctcaacatctttatagcttctaaatattaacttgtttggctctcctgggtgctacttgcagcagttctgacaaaccgtagagtaatttgatgcttgattgtattcttcccggttaattgccacatgtatgccttgacctatactttttcgtatctcttaataaatttatctggtggttctgatatatttgtcttggacaaggtgcacttaatagaatctaggttcttgctgaaggtacttgagcttatggaaacagtaatatatggtgaaacagctataatatcagaaaatgctctgagtcttctttagatgtcttaactcttaatgattgtgagtagtgctgtaatgcactagtttgagagttgagttatttttccgtatcactctgttggtatgacgtgtgatgatatcacggaatgtagtcctccttatttcatagtagtcgttctgcaggttaaggtagaggacatggatgcctatgccccaaatgatcttctagttgttactacaggttcacaagtaagtcttacagcctaagagatctacaattttcagtagcccatgcaccaccttataattctttcaaatattttcaggcagagccacgtgcagctctaaatcttgcatcttttggaggaagtcatgcccttaaactatccaaagaggatgtccttctgtattctgctaaggtacttcatcattgtcattgtcatcatctcttcactttattgaccttgatacattactttagaagctttgagattagttaaatgggatggtgccattgtatgttacctacccacagccatgcttcctagatcaagtcgtcatcttttcacttgctgccttgctggcttcttcctacagcagaagttccttatgctctgttgaggaaattgtcttttcttgtatgtgtgtgcttttatcgattaaaatctctttgcttaaaactactatatatagaatgatgcctaattcatcagtaaaagaactcatgaaactatggcaataatgcatcctttgtgtattacgtacgcgtccaggttgattggtttatattttgattgctagaattgcaaatgatcttgtgatgtatatgctttcttttcaggttatccctggaaatgagtcacgtgtaatgaagatgttaaatcgccttactgagcttggtccaaaaattgtgatgggaaaggatgctggtctccatacctctgggcatgcctatcacgatgaacttgtaagttctccttcgcctgtactgttttctgttctttgatgttaattagttccttttctgcaatagcaattgccttctactatcctgaatctccttgttaaataactctctactctcgcctgacatgagctgacatggcatgccattttttcactatttccaggaggaagtcctacagattgtcaaaccacagcatttcttgcctgttcatggagaactcctgtttcttaaagaacatgaattacttggaagatctactggcataaggcacaccactgtaagtactctcttagcgatggtttagatatcatgggcaatggatttctgtaataagggggagactacttatcagtttaagtctttgaaggttatggtattttgaacaaacaaaatttatgtagtgtttgcttttcctccatgccccttgtaatcttaaattacttgcgtaaacaaaaggatttaattattattcactttaaactgtaaactggttggagctccgtttctctactctttgagcttcttacaatatttgttcatgcatctatctgcaaatgaattagcacttaactactgaagtatctatctgcaaatgaatttgttttttccttagttatttgtaaacatttgtgctcgggtcaggattccaagtatcagcattccatcatatgtattttttagccaaatgtaaaaactatttggtacttgttattgttcttagattgcttgcttcaatctcaggtaattaaaaatggagagatgcttggcgtgtcacatttaagaaacagaagagttttgtctaatgggtttgttgcattagggaaggaagatttgcgggtgaggatctattttgtaccattccctttttcttttcttttttttggcttcacctactctaaatctaacatgatgcactgtatattgtagctaatgtatagtgatggcgataaagcttttggaacatccactgatctctgcattgatgagagattaaggattgcatctgatggcgttatttttgtcaggtaatattaaacaattttggtgcatttgctatggtgtttatcttcagtaaaaatctcctctgggatcaaatgagagaacaaattatattaacatgctgctcttgtgaaaacggcaaaatcatatatggtgattgttaacacttatcttgtttcttgcagcatggaaatcttccgacctcagaaggaacttgcttcatcacagtcaggattgaaagggaagttcaaaataacaacaagatgcctatggcttgataatggaagactattagatgcactttacaaagctgcatatgctgcattatcaagttgtccagtgaattgtccacttagtcacatggagaggatggtatctgaaatcttgaggaaaatggtaaggaagtatagtgggaagaggcctgatgtcattgcggttgctacagagaacacaacagtgagttttgtagaagactcagaaactaaatcatctggaaagtttggatctttctcagctcctaggcattcgagcaggagttcaggtaggagtcttgaagaaagtgataaatcatgcccagagaatacagagggagaggctaaaggtactattcgcaaagtatcttaatcttacctttgaaaatgtggcggtctaaccctatattattatctgtattaagtgtcccatcatactgattttcttgttcactgttcagattcatgaaattctgtgcatttgattccatgccttttgtgctgtctaagatgtatcgacactgtcgttactttgttacacagaaaatcttcctgatgtcctgagaacaacacgtgatgatgcaaccacaagctccaatggcgaagcatttttctcctcagatttgcataagcctaaaacactagagcatttttgggactcattcaaatcccctacagctgtaaaaattgcaagaattgtcaatggttcagctcaagggagtaaatcaaagattggcaagatcagcatagtgggtaaggactctagcgatccttcttctgctccagttaaatcttcaaaaaagaacaagtggaagcctgaggaaattaagagcttaattcagatgcgtggcgaaatgaatgagcaatttcagactgtgaaagggagaatggttctgtgggaagagatatcttctagcatgttgagccaggggataagtcgtacaccagcacagtgcaagtctctatggacatcattggttcagaaatatgaggtagatcattgacgtccttacagttttggcataaattcagtttatcttttttattgcgaggaaataattaagtttgacttgttttcccatcttgtggtatagcttcccaaatgcagatataataccacatatataagctatatgatgcataaggaaaaatagtcaaattatgtaatttctatagcttatctggttatatgtgcatcatatagcttatatatgtggtattatatctgcatcatgtactgcacaaacgtagcagctgacattgcatttgttagtcagaagcagcataataggataagcttaacccttcagtttttatttgtttggcaggagagcaagaaagatgaggaaagcgtaaagacgtggccgtatttcttggacatggacagggttttatcaagccaaggggaaatggcaacccaatgatcccaaggccgtagtttagtggttgtaattttggagagtgatggcataatcaatcaagtggcaggatgagatggctgcagcgtgttcttctccagagaatatacatgccataattcattccacgaaaagggaggcaggcacttggaatgactaagctgctacgtattcaccatgagtgtgctacagggctagggatagctgatattatttgatcaactatactagattaagtaattgaatagctaagttttgttgtgctattatttttggtgtaagaagacaccaaatgctaatccgaaggctttcaattgagctacccacatgcctatgcgtgtaaattaacatgtttgattgtgggacgtgatagggtggttagagcgaacgcatttatcaggtgttgtagtttgagggtaagtgggatgagattattctttaaaaaggaatattcatttaagatctaggttagctctataccttaaaaattaaggcccttttgattcaaagaaaaatcatagcaatttttaagaatttcattcctatagtatttttttttctatatagccctttgaataaaaaaatgaatcatatgaaatttctatggaatatcttattctatgcaagttttggaggaaatttaatacgaggtagaacatcatgggaagtttcctttgagtttttatctccttaatttttgtgtttttctcgtggtccaatcaaacagtcgtttctatgtttttcttatgttttgcaattctatattttagacttgcattcatattagaatcctatattttttttctatttcttcgtatttctattcctatgatttaaagggagcccaatggactaatccaatcgctccgatattgatatgtgggctatgtcatcctctaaaaaagcatatcatctctcacgtcaaatctatctttctaaagttggttcgtctcaagctatcttattgggtcatatggtaatgttaaatttttagataaatctaaggaaattatgcataaggaaaaatagtcaaattatgtaatttctatagacttctcaattatctgtcttcagacaaatctagagaatatccataaaaaaaataccgagaagcaaacaaaatgcacatcatccagattctggaggcttcccaatatccctttgcaatctatctatctatctcatgttgttggttggttttatgctagatgattagttgccctcaccatcctttagttgaccttgtcttcagataaatctagagaatatccataaaaaaagaaataccgagaagcaaacaaaatacacatcatccagattctagaggcttcccaatatccctttgcaatctatctatctatctcatgttggttggctcccaatatccctttgcaatctatctatctatctcatgttggttgggtttatgctagatgattagttgccctcgccatcctttagttgaccgacacatggtaagatataagcggcagaaagagcgttgggtaagaaaccatcactataaaactggcaagcacacaagttatgatggtgaattaaaaaaaagaagagtcactccatgtgcgtagctaggccacgcaacaccacaatccaacagtgcgtgatcgaactaagtgcaaacacgtaaaagaggggaaaaaggaaaaaaagatgaagcaaaacttttttgtaaaattatttgtaaattattcggggcaagtatcatgaccacatatcctatatttcgagaaattaaaaagataaatagaaaaataaatgacagaaactttttaatcccgataacctaaccattttctaaatatatatattttctgcttatactataaaataaataatatgcaaatcttttaacttttagaaaaagttataattccaataaaacaaacaatatcggtgttgatccatatctagagtcttaaaagtcatacacataggttaattagcggaagcgccaggcgttgcgttgattttcagttattcaaaaccacgcacattttactgcatctcacttcaaaatttttcgaaaaaaatccactcggcctgttataagcgtctgcattagccatatgtgtctctaaatcaaaaagaaaaataatttataccaatatattaagaagctcctccaataaataagaaatgactaaatcgatttctgataatcccaatattctttcctcttcatgggcatcctgcgaagaaaaatgtttagttttagacataattagttttatgggactagatgtcaaagttttgtagttagaattggaagaagcattgttaaggtaaactgaaccgacttatgctaaataacatttagctagctaattaactaagcaaaaatacttaaataatttaacaagcaaatttgagatgtacacttactcgtgaacccgtggactcatgctgctttatatgccttgaaaaaaaattagcaatcacggtttggttcaaaaggaagtccctcaccagtgttgatagctccaccctcattactcattataagaatccacatcattgttcacccaaacaacttatttaagaccgggaggtcggacataacattcacccaaacaacttatttaagaacaagaggtcggacaaagcatgcatcgcatgttcatcacaatttgcatgcttaacctctgcagtaatggaataagtgttgcactgttggtcttcttatgctgcagatggaataagtgttgcactgttggtcttcttgtgctgattggtctttgtatttttttccttttcagcttctaggacaggactattttgggatgattatgggacatcatctcctttcagtttgggatacttacatgacaacatctcctttcagtttgggataggacatcatctccttttattgtaggatgcgctaggacatccttgggaagaagggatgggttgcaaggggtagtgctggagatgctgtgaagttagaggatggggaaacagatgttaaggtctatggttgggttgcccgagaaggggactataatgccgggaatgtggtgggcaggtacttgaggaagcataccaacctgacaaccatatatgaggtctccaagagtcaatcagagaagtcggggaagatggtagcgaaacatctcctttttcactttttggactagcaacacacctataaatatgtatcctatcccgggtttgggatatttgtaggacatcatctccttttagttctaagatgtgctaggacagcatctccatttttactttttggactagcaacacagctataaatatgtatcctatccctcgggatggtatgatattcgtgagaaaataaatagaaaatgccgcaacactcccaatgtcatcctctcgataagagtaaggattctgctactaacaagtggtatttgagccgttctatactgtagcctgatatctcctgctcatatccttcccaagctcccctctattctcagccggcagtaggaacaccagctgttcctgctcatccctctttccctgcgttgacgagttgtgctcgtcagaggcagtctcttccccacgcagtagccccccagtggcgtgccatgtccgcaggacagtctcagcgctcggttgtctcgagcgcgcggctccggcaggatgccgagctcaccgcggcagaggaacgcgagcgagtggcggcaaagaccgctgcgatgacagcgagggcatcaaggctggcggcggcggaattggcagtggcaagggcggaagtggaagcagcagcggcaacggatgcagcgcgtgcagcggcggcggagctcaaggctctacgcggcagtagcaccagcagctctgtctccgcctacggcagcaccgatgatgagctgatgagggaggcagctcgtgagcaggcagagcagtgggctgccgcgcaaccccacgcgcgtggcggcagcagcccagataggcgcggacacgccggcggcgctcctggcggggggcacgcggcagcggcagcctcttcccagtcttagcgctcggtcacctcgagcgcgcggtttcggcaggaggccgagcttgccatggcagaggaacgcgagcgagcggcggcagagaccgctgcgacggcagcgagggcgccaaggctggtggcggcggaattggcagtggcaagggcggaagtggaagcaacaacggcgatggatgcaacacgtgtagcggcggcagagctcaaggctctacgtgacagtagcaccagcagctctatcaccgtctaaagcaacaccgatgatgagctgacaagggaggcagctcgtgagcgggcggagcgtgcaaccccatgcgcgcggtggcgacagcatagacaggcatggacgcgccaacggaccccctggcgggggcgcgcataatggcgacgctcctggtggcaacggctgggtcgatggagatcgtggctgttgcaggcggcgcgactctctctcacgggatccaggccgtcaacagggacgtcagtcccggcagtgggtggcctactctcaccaagaccaactacgtcaagtgggctgcggtgatgaggataaggatccaggtgcggcacacgtgggaggcagttcggtacaacgacatcgactacgacgaggattggcgagcgctggatgccctcatcgctgcagtcccgctcgagatgtagttctcgctttccaggaagcggactgccaaggaggcctgggacgccatcgctgcggcacacatcggcagcgaccgcgctcgcaagtccacactacaggcgcttcgcaaggagtgggagaacctggccttcaagccaggtgaggacgctgatgacttttccctccgtctcaatactctgctgcagaagatggtgcagtacgacggcgacaactacgacgaggagagagtagtcgagaatattttccgttgcgtcctagagaagtacaagtagatcgctcgctcgatcgagtctttgctggacctctccacgatgtcgatcgaggaggcgataggtcgcctcaagttcgtcgacagcgatgagccacaacctttctcggggcataccaccattggcgggaagctccatctcactcaggagcagtgggaggcctgtcaggatgacgagaggaagggggagtcctcttcctcgacaggcggccgtaagcagcgcaaggcgcacggaggtgtccagctgcagtgggcgcgaagacgcgtcgagggtggcgcttgcagaggcgcccagggcggcgccgctggcaaccacaagctggcacgagacgacgcctgccgcaactgtggcaagcttggccattgggccaaatactgtcgacagccgacgcggccaggcccacgttgcacaggtggaagaggaagagccggctctactcttggcacacgcaagcatcgagctacctccagcggcatcggccgcagcggctctcctccaccttgatgagccgaaggcacatgccttcctcggagatggctctagcaacgacaagactgatgggtggtacctcgacaccggcgccacccatcacatgactggcctacaagagttcttcaccaagtttgactccagcgtccgaggctccgtcaagtttagggatgcctctggcgtggagatcaagggtgtcggttccgtcaccttcaccgccaagtccggtgagcacaggctgctcactggagtctactacttccccccattaaagaactcaatcatcagcgtgggacagctggatgagaatggttcacgcgtgttggtcgagcatggagtcatgagtatttgggatcgccgccgttgtcttcttgccaaggtaatcagaggcaccaatagattctacatcctcagcgtgtaggtggcacaaccggtttgccaagccacccattgggacgacgaggagtggcagtggcacgagcgcttcgggcagctccacttcgaggctctgaagcagctcagtgccaaggagatggtacacgcatggacgacgacgttactacctgctgctcgtcgacgacctctcccactacatgtggttgatggttctcgtggcagcaagggagaggctgcggacgccatcaggcgcgcacaggctgctacggaggcggagtgcggccgcaagttgcgcgtgttgcgcatcgacaatggcagtgaattcacggcggctgaattcgcgtcgtactgcgctgatgagggcattcaacgccactactccgcgccgtacagcctgcagtagaacggcgtcgtcgagcggcacaaccagacggttgtggggatggctcgggctctcctcaagcagagagagatgctggccgtcttctggaagaggtggtggtgatggctgtctacatcctcaaccgctcgcataccaaggccctcaacgacaggacacgtacgaggcttcgcattgtcgcaagccggcagtctcccacctgcgggtcttcggctgcctcatgtttgccaaggagcacgaccacatcggcaagctcgatgacaggagcaccccaggggtgttcatcggctatgcggagggctcgaaggcctaccgcattctcgacccggagacacagcgtgtgcgcacggcgtagtgttcgactaagggcgagggtgggcatgggacaaggcggtggacgatggctcgactctgacgtacgacgatttcactgtcgagtacgtccacttcgagggagctggggagtaggcagctgttcctcctcaccaagcatacctaccccagtccccgagtttccaccgactccggcagcaacacactctcaagctacgacttcagttgcgacgagttcttcaccgacaccaccacaatcagctaccccacgcactccagcaccaacaaccaccctaatgggcacgtccactcccatgccagctcgtgttgagcatagcccggtagagttcactacttcgctcttccacaacaaggagcaaatcgacacgtaccacgatggcgagccgctgcggtaccgtacgatggaggaccttctcggcgaccagccggtgccgggactggtgcctcgtgacctagaggcgcaattgcaccttgtgtgcaatgatagtgagcctcggtcattcgtagaggccttgagacacgcggcatggtgtgccgcgatgcagtcggagatggacgcgattgaggagaaccgcacctgggagctttctgacctctctcgtggtcaccgcgcgatcacccttaattgggtgttcaagctgaagagggatgaagccggagccattgtcaagcacaaggctcacttggtggcacgcggtttcgtgtagcgggaggggatcgacttcgacaatgccttcgcccttgtggcacggatggaatccgtgtgactcctccttgcgctggctgctcaggaaggccggtgtgttcatcacatggacgtcaagtcggcgtttctaaatggcgatttgaaggaggaggtctacgtgcaccagccgctgggatttgcgatccccagcaaggagggcaaggtgctacgcctgcacaaggccctctatggcttgcggcaggcaccgagggtgtggaatgccaagctggattccatgctcaaggggatgggcttcgagcaaagcccgcacgaggcggccatctaccgatggggcaatggtggaaatgccctgctggtgggtgtctatgtcgacgacgtggtgatcaccggcaccaaggatgcgtaggtggcgttgttcaaggaagagatcaaggccaccttccagatgagtgacctagggcctctctccttctacctagggatcgaggtgcaccaggacgactccgggatcatgcttcgacagaccgtctacgccaagcgcgtcgttgagctggctgggctcaccgattgcaacccagctctcactctgatggaggagagactgtagctgagccgcgacagcacgacggaggaggtggacgctacgaagtaccgacgtcttgtgtggatccttcgttacctcacccacatacggccagacttggcattctccgtcggctatgttagtcagttcatgcaacgaccgacaacgaagcaccagcaggctatgaaaaggatcatctgctacgttgtggggactctcgaccacagtctctactacccgaaatgtcctggaaaggcacacttcgtcgggtacagcgacaatgaccacgccggcgatatcgacactagcaagagcacgaataggatgctctttttcctcagcgagtgcctcgttagttggcagtcagtcaagcagcaggtggtggccttgtccagctgcgaagccgagtacatagaggcctccaccgcttcaacctaggtgctctagcttgcttgactgcttggtgatctccttggcagagagactagagcggtggagctcagggtggacagcaagtctgctctggccctggcaaggaaccccgtttttcacgaacggagcaagcacatctgggtgaggtaccacttcatccgaggctgcttggaggaagggagcatcaaggcgagctacatcaacaccaaagaccagcttgcggacctgcgcaccaagccccttgggaggatcaagttcctcgagctttgctccaggattaggatggcccaactttcctacaagacgatgcataagacttagggggagaatggtagaataagtcttgtgcggttggtcttcttgtgctgattggtctttgtgttcttttggtttttagcttttaggataggactagcatatttcagtttgggatgcttgtaggacaatatctcctttcagtttaggatgtttttaggatagcatctcctttcagttttaggatgcctaggacaacatctcctttttcaccttttaactagcaagaaatatgtatcatatccccttgggatagtatagcattcgtgaaaaaataaacagaaaattgctccagctcttccagtgccatcctctcgatgagagttctcttccagcgccatcctctcgatgagagtaaggattctgctactaacatgcatgaacattggtctgccccatgtcaccagtactggtttccttactttttcccttggtcaattttatccttgatgtttttcctaccattttttgtatcgttttgccttctcttttttctccgttgtgcttgctgttgcaagtacatgattgtcctgtctagattgcaagatacaacgtaaaatgaaagccgcatatttccccaaggttttcaggatttgatggagattatctaaaactgcagagcggatcaacggatgttttaaagcaaagtaagcaatcaacaacttctgaaacttctttactgttaaatattatatcccaacaatcagcgtcccatgagagaatcgccctgatgcttaaagaaggctgggaacatcccatcacacttaaacattggtagaatattcttcgagaccactacaagatccttcaacaaaatcttgacgctgcattttggataaaatggccttattatttcaacaatataatttttagaacataccgtaacatgtacgctagtatatgatgaaatgggataaatcttctttgcagtactgccctccgacttggtcaaacagtagtgtagtgtgtagaggatttgtttatgatggaaccatcttatactaaaaaaattaggatgagccttaaccaatctcacctcatctccaaatcacagccaattgatattgcctaaacgaagaaaacgattaaacccgataaccttacgagcgaaacattttgactttatcatatatatctatctacctattatattattaaaacaactttgaaaggagacaccacgttcgctgcgggaactataaattctcacattaatcagaaaaaagaaaaaatattaaccgttagatcctaataagtctagattttaatggttgagattcaatatgagtccgtacaaaagttctgaaaaattgcagtccgtttagctaaagcacaaggaaaaagttgcagtccttcaaccatcggtgcattacagctggactatgcatcagatatggattgaagtatgtatggcatcaacaacaccatgaatgagatcctatttgcaaactgacacaaatcaaaatcagaatagcaccatgggagacaccaataaatactacccacatatgattctgtcactcggttggtgactaataataattcaattcggaatacaatattcaaaataaaaataaggccagctgaaaaaaaaatacaccatgtagaatataacacgaggttaattaaaacttagaataaaaataaaataaattctaaaattaaatttcaatactaattccaaagaaacttaaaaaatcattaaaatacgaaataaaattataataaaaactcaatctagatgctataaattcccatactcatcggagaaaaaaataaaaagaattcatgtaggtatacaattatcaataattaaaatccaaaataaaataataataataataatttgaaagaagagaccatctagaatataaacgatgttacttaaaatttagaataaaaaataaagtaaattccaaagttatttctcaatatgattttcagataaacttaaaaatatcattaaaatttgaaacaaaaatagactataaaattaaataagtaaaaaccacatgcaagaagagtccatagaaaaatacagcctataaatatccaaaagtaagagtaattaaaattcagaaaaaaatataataaattcctaaattaattttcaatactaaatcggtataaactttaaaaatatcatgaaaaatcggataaagtaggaatataatttcgaagtaaccaaagttggcaatacaatgttgttgcaatatgatatatgtgccctaaatgaaaccaccaaattttattttggatatctagaaaataccacatttacttatcgtaccattcaagccttttttcatgcttttcccgaaggtctggagaaagtagtaatcaataggacttcccttatcctcccttcctaaaaggaagaacttgaaattcttttttcctttccgcagggaccgggaggttggatctatccataagaggaatgcttggtataaataagacacttcttggtctttgacccccctaagtcactacgagcgccctagatgagtgcaatgggatgtggctatttatctatctcttgagtcaaaatggaagcagggcaggattaaaaaggatcttagagtgtctagggttgggccaggagggtctcttaacgcctggtaactttaaaaatatcatgaaaagtcggataaagtaggaatataatctcgaagtaaccaaagttggaaatacaatgttgttgcaatatgatatatgggtcctaaatgaaaccaccaatttttattttggatatatagaaaataccacatttattgaaggaaaaaaatgaaaaggctacaccatctgactgtagattaagaaaagaaaacaaatgaagaattatagaagaacttctagatgtatatatgttcaatttttattacaaaataaaaaaatataggattgacatttaaaaagggcatctcgactttagaaacgttttctgtaaggctgctggatggcaagctgctcaagtgaccaataatgagagctacgagagccagagagctacgagtaaggcaagggatacggtggtggcaatagttgtgggacttctaacgtaatcacatcgacgataagttccaatcttctttggcgccgacgacaaggaagaagagagattgcatgtgctaacgagtggataggcgataaagggacagtgaggtggttattgctatgggagagcgagccgagaggcaacaaataagtaaaatggtagtggtggcatctaaaaagaataaaaatgagcccgatgatgataaaattcaatgttataaagtgttgatgacaacaaagttgacggggcaaaatggcgggccacaatggaacaaggaaacaacggttgttgtgggagagcgaaccaaggggtgacagatgacaataaagaagggggcaacaggcaggccgtaaagaagtagggtggcagcagctgataagacatctaaaaagtataaaatagaaactcaaagatagatatgtttgatttttagaatcccaataataataaagagttggggcagcggacataccataaagtagtagggtcgcagcgattgataggaattctagaaagtgaaaaagagcacaacaatagtcaagttcgatttttaaaatcctaatgacaataaagagtagagacgacaacggataggttggaaaggagggtggcggcatttcacggaacttctaaaacttattaaaatggaatccggcgagacaacaaaatctaaaaagaataagatccaatttttaaaggcatcaaggatgatgaatagaaattatgacgggtcgagcaagtaagtaaaagcgtggcaaatgactaaagagggtgacagttggtatgacttttaaaaactataaaattgaaaacatgagaataataaggtttaattttaattttaagaatcccaatgtcgataaagagtaagtgtggtgggtaggtcataaaggtataggttcatagtggttgactagactactatgataataaagaggggaggggcaataagcggacagtaaaggagcatggtgacgacatttaattggacttttaaaaattataaatacaaaacctggcaagacaacaaaaactcgttgattatggggttcaacttttataaagtcctcagacaatgatattattatttaatagttcttaaagaaaattatgtgtaaaaagattaaaaaattttatctagatactagccgcgtaattgcgcgggccaccctcctgctagttcctttaacaagaaacaaccattctccctttctttcttccctcactttggcgaaatatttctaactttatggagtaccatattcctttccttcttacagttcatactagtctcttcttccctgctaccaatctacctattccgctttggcactttgccaaaattactattctccacgcacgcatgcatgcagctcgatagctcatcactagccaagcaagcttgccagctgccagcagcagctgagagtcaatggcgacatctcgccggcttacaggctacagcctgaccggcaggccgtagttgtggaaggccctgatggcgccgccgcggctgccggtcaccaccaccatgttccacgccgccggaacctgggaccggcagtcgtccatcccggcgcagttcacgtacctcagcgacggcagcagcctctcctccggccacgtcgtagccgccgccgccgccgccccgtcgggcacgacgaaccacgtgccgaacgagcaccgctcccggtcgtagcacagcgtcggcgcgtccgctccgccgccgccgccgcccatcgccctcgcccacggcgccaccgccgtgacgccctcggagaagaagagctcgcgcgagctcaccaccctccgccgcctgccgccgccgtcgaagttccagatgcggatcttggagtccctccccgccgatatcaggtacctgccgtcgggcgtcagcgacggaggcaccaacaccttggacctccattgtcctggaaatataataaatgcttgattttttgaatattccaaaacatgatgacatatactctccctgttctagattataagtcactttgattttgctcaaggttaaactgccccaagtttgattaagtttgtagaaaaaatagtaatactttcaaccaaacgtaaaaatatattatgaaaatatattcaattatagatttagtgaaactaatttggtgttgtaaatattattattatatttgtctctaaactaggacaaacttaaagtaatttgactttgaccaaaatcaaaacgacttataatctgaaactcaaacggatggagtactatggccctgtttgggggagcttctcccagctgcttctgctataagctgccctaaacagtccacagcttctgagaatttgtagttacagattctaaaaaatgaactaagaagccagaagctggagaagctgggtttcagagcttttccagattctcataagctggctaccaaacagctgcttctcaaaatttaaagctccctcaaacagggcctatatatatcaagtgaaaaccgcttatgaaattttgaggagatttgttttcatacaatagaatggtgaaagagactgaaatgaagtcttttataccttgaaacttttgggtgatcttatgaccttcagagactcggattttgtgatctttcgatgtgattatcatcctagatggatggccctgagagaactgcatgagagatgacaataataatcaattggccggtattcgtgtagcaggctaaaatcataaactatatatatatgcatgggatgaaaaaaaaatttaagcaactaacctgaatattggtaatcttgttggcagcacaccgtctccgctttatgcgcatcagtttgttcctttcaatgtttcgacctaatgggaaaagacctattgggaaagaaaaataataatgtacaatgcttagttaataacaacattattccctccttgtccttaaaatgagaaatatctgaaggatcagaaaaataaaaataaaatgcagtcatatataccagattgatcatagaagcggcatctccctttgacagaaccgacaacgaaaccctgacaagggtaaaatgcaagaatcagcagctagttactgggaaataaaattcaatgacattttgataatcaatttttgaaaaaaatagcattttgataaagcatgaacctttccatctggtcggtgacttatagctgttatgatgtattttgtgtcatcccaatcaactactcgcttgtctgaaacatcccaaacacgaactttgccatctattgagccactgatgaagtacctttcatcaactggattgaattgaacacatgtaactgttgacaagaaaagaatatcaggtcaacatcattaagttgaatctactacataaggaaagaaaaattaggaaaaaatattttgtgggcaattaacttttttaggaaaaggaatatatttattccggcctcttcataagccatggactaaaccattcattattacaaagaagtatttccagtttaaaataaagaatgctagcaaaataacacgttcccagaatttgagctttgaataaaaacgcttaagcacaaagcctgtttgatatttccatcaccatagttaactgctatgggatgtttgcacataccataatctccatgtctgaatactgcaaggcagtcataacagccaactttccacatgcgtattgtcgtgtctttcgatgaactcaagagaaactgcaggaggtatatactactagatcagttcataccaaatttaacattacacttctcacaaaaaaaatacacttcaatcatttaaatatccaaactacatgagacagaagacttacatctgactttgaccatgccaaatccaggacatcacttgtatggccttgaaactcatgcagaggtgtctctgtgatactgaaaaccttctttggtatgatcgcgaggggcttaattttcacgtccttcttcttgttcatgtcttcaggaacatctctgccgtacaaatcaggcgaagattcaacctctgtgatctgccaaacgcgcacgacgcaatcctcgccgccactggctagatgccacccggatgaactgaacttcatcaccctgatcaatccctcgtgtgcctggatctcctggcacatgtagacggcagtgaagtccatccacttcttgttctgctgatgaacttttgtcctgtacaatgtgcctgagttcaatcctcttggttggacatgtacatcatccatggaaagtactctatctgaaaccttcttcctcatgaagatttcccacaagctcttgaattcgtttctcttagggccgtgaccgaagcgaatgcgcagtagttttcgcattagtttagagaatccaggcacaatctcaggcgcatttggagtcaccatttcatcagatgatgttccagcctcctcaacaatctccgagaggacatcgtgctggccttgatcatgagatgttgtgcttctccttccactactgttataatccacatcccttgtgcagttatcagcactatcattagtattgtctgttgctgccaaaatactgtcagagaagcaagaacggaaggaagagcagatgctactgatcctctcctcgaaatcgtgaaatgagcagcaatccgttgttgcgatttctgccagccactgggggaaggccgtcccggtaggaccgggctcaagaaaccccattcctttcaggaatctgtgtctcctttctctgacactcatcggctcacctgcccacagctcgtacccagcttcacttgtactaatctccgttgagcttctgttcttatcgtcgtcgtcgtcgtcgtcatcgtcaaacgcgtcgaagaagacgtcgtcttctccatcatcggaatagtctgatcttggcatgttcatcagctactttcaaaccaagcagaactgccaaacaaggccgtagatcgtaggatggacgtccttaattactcagtcagtaggaacaagtacattttggtatcttcaagaattcccaactgatgatccgacgtaagtgccaacaaagtattagacaaggaaaaacattagaacatgatcgacgggaaactattttaacagctcgagtggatgtctacccgtttattgcatgtcatctaaatggttatgaaaaaaattaaaaaaatatgaataagatagatcaatatctaatgtatcaatccacaaacatgcaagttaaaattcaacttctacagattgtaacaaaaataacaaataaaactcaaattactatatgtatatttacagttaaatttgttagttttgttacaacttgtagaagttgaattttaatttgcatgtttgtggagtgatatattacatattgatctatcttgttaatttttttgaaaatttttcgtaatcatctaattgacatgcaataaacgggtggacatccactcgagctattagaatccatcccccatgatcgactgaactactacaaatgaaatacatatacacgcacagactagagtaagtagtgaaggaaaataacgaagaacggaataggcgaatagcccatcaacacttcgaacatgtatcgaattatacatagagatcgttatgtcttgaaccaaatggagaacactttgattaaagagaagagaaaattccaatccagatgagacgagaaaagctagcacagagtgatgccagtttctgaagcccggagttgctgctgcactgcactgcacagatcgtgccgtgctgtactgctcatctccagccgttgtcagcctcacgctggcagtagcaggattcatcaagggaagcaaaacaagagtttcacaatgtgcagccgctgctaactgacaaaaaaaaagatacaagagaaacaaaacacaaaaagattgcactagaattcttccttttcattgtgatggtatactactgtatttcactagaagcgcagatacgtactgtgccatctccagcaataaagcgcgtgaatccaatcatcccatatcatggatggttgacagtgagagttagatgatcagaggacaaaagaaaaaaaaaagaaaagaaaaagaaaggaacaaaagcaaccctgccaacaagacaacaccaataaataatcccaaccactaaccactgcaaagaaaaatcttttttttgagaatgtgcagagacaaactaaaagcactaaagcagcaatgtactcggatccttttcttggacctcatcagtttccgatgatggattgatcgatcgatggcatccgatccttctgcaaacatgcaacttttctttctttgcagttcttgccggcaaccagggcgtcacgtcgggaaaccgggaatccgacgacaggaacacacacgcccatgccacgcgcgggtcccaagaaattacgacagctgcagaggccagcaggtgatcatccatggtagtacaagaagacgagagagagacggctgcacggtgcagagctcgtcggcggctgacgcgtgtgccgccgccgccgcaagatctcattattctcaccgcgacggttaccgttgatgtggcgtgcaggtacagcggccgtactggcagtaaaaacaaaaagacgcgatcttttttttttatctgttggtacggcgctggagggaggaaattaaattaacctccattaatgcaagcgacagagaatcaagcatagataagcttgaggaattcacttagttttctaccgcaagatagagagtcgcagacagcaagcataagaagcagaaattcttatcaaagagactgaattgttcagagagtactactactgttccattcgaacgaccaaaaatgcaacgatcatctcacaactctatccatcgctaagcacatcaagaagcgagaggagaaccaaaaaaaaaaaaagaaagaaagaaaacaaaacaaattcagacagaaatgatgcagaagaagaactaacaccacagcttattagctcaaagtctcaaaccaacagcagatcgctcacctgaggcattcatgatcgttctcttccggagccaagaaacagcagctagaagaagaagaagaattctcaggtcggtttcccggtggtcgggagggttcttggcgtcgatcagcgaactgaactgaactctgaactctgaaatggtgtggactctgaagaagaagaaggagaccgacgaatccgacgcttaaatacgtcgtgtccggtgcccctctcgccccccacgcacgcccggtattgcatatcctgtgggccaattccgccatggttttgccgccgctgacaggtggcactcgcctcctccctccacgtggacgtgcacgccccggtatcccccttccaccaggtggtctttttctggactttcccatgcataagcatgcaaactgaccgtatgctttgctgctgtacatgtgatgtgatgggggatgttgtttgcaatttttttttttgcactgttcgccgctggcatgtgggcccggcttttcgtatggctggagccctccacacgcgatgcacaataatcatcggcaaagcaaagaatttcgtaaacgatccaaaaagctagctagctagccactatatttcttgttccaggaagcaaaccaatctatcaaaacgtacctgtacgtagtgattccgaggaataatggtcgttctcgatcgtcggttcaccaaaaatttgccttcaaaatgtgtattggaatttcaaatctaattaagcatcagatttggagatgtggaacgggaaaaaccggttggaaaattttcagagcaaacacattgaaataggttgacaccgatatatgcagaaactaaagaatagacaatgaaattattcatcgaaatttcttaccgtacaatcacgttgtagtcgtagcattcaattctaaattgatagtctgaggatgatcaccatacttctagtttcattgttttgcaataattttggtgcaaaaacagttctctgtgtactagccatataaagttgccatttcaaaaaagcgcgggagcaaattaataggtgtctagaaagggctgagcgaagcattgcggatatatgccacaaaatttaaaaaagctaatttgagtaggtctaagcttagcacgatgacggatgcacaattaaatagaagcttcgatagaagcgagcaaagcataacggatactagaaaattaaataggagcatggctatagttgagcgaaggacaagacttgtacgacatcttgatactaaagattggtgggccataatttaccaatacatctggacggacaacaaattaaggcaacctgggctatcgttttaagaattgtttaattgggccataatatgattacggcatataatatttatttttatatatgtccgttttgttttttaatctgaaacggatagatctataaagtttcactcaacatcatggttagtaacctcgaaatatttaaggcttagtttagaaagtctgaaattcccacaacttcaaaaaagaaccgccaacaaaccaaacaaaaagtggcaaaaattaagaaagaagctaggatctattttgtttccaacacaaatatttttctccacctcttgttcttctaacttttattcctatttatcaatacaattgttagatatcattccatatcttataaataaaggacaataaaaggaaacagccaaatatgatttcactctacgtaccaccaagagtgcaagacaatattcttaccatctccaatagatataacaataaattttcatgttataacgggaaacaagcgagttaaccgctaacataataatgtttttcgttaaataattagtatatattccctctattcttttatatgtgacattggtttggttcaaaatattgtactaaccaacactatatagaaaaatggagggggcacacacaatagcatatataatgtgaagctcagatcatttgatggcctaaaacataggacgatggtcagagttatatttttcatgtatacagtactccctccgtcccgttatatttgacgtttccgaccagatcgtgaaaattaaggaacgtgtgaaattacatatttgccctgggccttctcctctcaacgcgtgagtcgccgccgcgagcccgcgacggaagaaagaggcggaaacgccgccacccccaacgccggaaacgccggccgctacgcccagccgccggggctcacctccaagatgccgccgccacccgtactcgctggaaccgtcgccgccacccctctttgccggagccgccggcgctctctcccgacgccgctactcataattgggcaccccaggcctgagacccagcagaatctttggacaaaattttacaacacttgtagtaagatctcatgccctccttttcacctacaacggcatcgatcgatcacctgagccatttgccatttgccactgatctatgaacactgtaaaaccttatcatttatcaggttcaggcacgctgcaactgctgcatctgccaaattgtgcttatcctgtgcaagaaatagctatagattgactcggccgggcaggtgagcagtagaacattcaaatctccttttctaaagatgaataaggaagaatgaatcagttgtgtttacaatattcagattttactttaaaagtttgtgtttttacagtattttcagagctgctcttggattgccagtttttcggctgaaatttcatagcagttctgatgatttactcccttcattgcccactcagaaaaactctcttttgcagtagtacactagtttatcaaatttcaacgtccaatcttctgggaaaagaagattcagaccatcatctgccagaagaagtgcattcatcatctaatgcaacaggacagtaactcctgagctatgcaaacaagtgagttatataatgctcagacagacaaagatcatcttatgttgaatttggctcagtaattttcagtgggcagatatgctcggacagacaaagaaaggctgacagtgtcttcagacttgttcagttgcagttcaactggaagagtatgtattgagtgtactcagttcttgagtttcattttatttacaaaatctgaattaatccttcagtagaaaccatgtttgccgctgggctgcttgaaccttcctggcttcatctcctagtagagcaatattttgtgcgtcattgctgtgaggtgataataggactaaaaagtgacaatatggtcagattttgtgaggtgataataggcctgaaaagtgacaatatggtcagattttgtgcatgttgaaattcagattttgtgataatgttggagaggaagaatccaagagcaattaggatgtgactttcagacctacattcagattttgtaatagtactgttcatttttaaatcttgaatttacttcagtttttttgtccccttagcagaatttatgacagttcttatgaattcagcatttcactgtgaattcgcaggacagtagtagcactccttgctgaaaccttaggttacagcttcatcaaagcagacaactaccattctcaggcaaacaaaggtctgaagaactcatcatctcacaaccaacctacatttccctttttcatttctgaacttctcagttcctccctgtccctgacaacagcaaagatgagcaagggcatccactgtgtgctggatgaatcatgccaaaaaccttatttataagccacagacaagtgcagcagctaagctagctcaccttcctcttcaccaccaagaacgcaagaacgcagcgagagaggaggagattcaagaaccggaggaattgatgtcgtcttcggctgtgattccgccgccgtcgccggagaggagggtgccgatggtggccgacgacggaggtggaggacatgggacgagatggtggcgtccgtctccatccactacttcatctgccacatgtgccgccacgccgccgcccggggctcgtcggccttctccgccgcgtcgtcggcgtcttcctctgctgcgccggtgcttcccgtcgtggtgcgtcccgcgttggtggagcacgcggcggacatggagcggctcatctcgcagctgccactcttcacgctagcgtcgtcgttggcggcgctcccgaagtcgtcccgcgcctgctgccgccatcccctgcttctccacgccgtctccggcgaggaaggtgactgtcgccgtcgaacagaggggtaaagatggaaacggtttttctgattgtactgcagcgtcaaacatttagactccttttaaaatgaactacaacgtcaaacaaaacgggacggagggagtaacggatttaaagtgtataaaagaattggaatggacgacatgtacgacaccaacagtgacctcctcatatctgcatggacggttacttgttgactccaataataaaagaagcccagtccaaataataataataataataataataataataataataataataatctttacctattataaaaattgaggatgattccatactcaccttagctttcgtccgtcatccgagttaaacacatataaaacccggatcggactaaaaaaaccatatagtagcgatacgactgttggaccggaaaaaaactgtctaccggcaagaaaaagactgggaaaaccatctaccggtgacgtggactatatactatgcaaaaatcagggatacatgcatgtgtgtgtgggattcaaactccggtctcctagggtacatactacatgctgcgctcatctagccaccagagcaatgtggttattgttttcttaagaaacttttctctatttggccggtttttaactcatcaatctccatcctcaatcttgttcacaggtccatgttacatcgcttctatgtcatctcagcttctcatgtgttattgcgaattctcacatgcttatcaagggtctaattggggaaaatttatacatcttttgggaacgcagtggaaaaattccatgcccgtattagggtagaatatggctcgagcagagggggctgccgcaagcgctttactggcatatcaaggcaaagcgtcgtccgagtccgagtcgtctgactcaataaagcgacgtgtcgttcgtgcatgataatgtagccatccgattctgactcggtaatacgtcgtgcatgcatgagaacgcagctggtgcgcttaggacatgtttttttctcatctgcatcgcttccccatgcagaagcaccatattcaatcaatatgtatcaatataattatgatttgagccagatatatatgatctaacaatctaacattgaaacttgaaagtcattataattggagtatgtaaattatttttatccgttgcaacgcactggtatttttgctatttattataaaatttaaagatgcatgcatgtttcataagcaagaaaacttctggctggcatgacatacggagcgtatacgtacgtgatggcgaccaaagtgatcgaggtttattttcccagaaaaaataataaaaaagtgagtcatatattttgtttcatgtctgccacggtgacagcctctggcctaagctagatcactccaaaacgccatctccagtgacgcacgctgtatactatagctactagcaaagagttatgccgtgtaaagtcgtacatacatacgatgtaccgttgattgatctgagaatttattatggtaatagttgacagttgttatacagtttcagggtcgtgttggacgtacggttaattcgcacggtaaatttgaagtgcacaatggatggatgcacaggatcttgcaaatgccaaattcttttccttatttgaggctacttcgtctcgatctctcttttcattttgtcaaacaagattatgtgtgcatgcaacaaaagaacgactagcttggaatattaacttgtacaaacacatgtttcgttccggcaacaaatataactaattaattgcaatagttaatatagagtacctccaaccttatcacaaacctatatcaagagaaatatgtgttccatgctccatctaatatgcagccttatctttttcttatacttatcagccaaaatttaaatttttcaaccttaaatttgaagctgattttgagtttttttttcatcgaaatttatgtttcagcctttgcttttagatcgctaagaacacatatataaaaattttattcacaaattacttttcatttgcaaatatgcctttctcttattccgcgaaatataccttaaacgatggctctgatgctaagtgcaccatgcatgtcggaattatcaacctaggatcttacatgaagaactaaaacgtcataataaatccaccttataagttagttaagatgcgaaagcgtgccaaaatctgtagccataatcatgagttgaataacaccaaaacattaggcacacctaatttcttaaactattgacgaggcatagtggattggtgcgtgtgccccaataagttgctggatttctattctaacacatcacataataggaaaccaatatccggtctctacacatatataaaagtacgcttccatataattaattagatgcttagatctcaatacaactctagttgatcgctttgtttttaggtcaactagtcataatagccataatatgttaatgccccccatagaaatttattctaacaataaatgcattaagcatctacttcagtgaatggaccaattaatagtagccaaacaacatggattgcagaagaagtacaattaaatagtagggaatacattctgcacacagttttggaaaaagaattttctgaagacactcttgattccatatatatatgtacacgtttgtttccttgaaaaacagatcaattgttctggcttcacttttctaaccacaaggggtagtaacatatttaaatcagattttgctaattggcatttgataaaaaaaattagagcaatattgtaatttatggagcatgggatcttctccatccactcattagcttccggggttagggttggggttggggccaagggggaaagatcccaatgatagtggtgaatacgggttggggggagggggtgtcgttagcaagccagcggtggtgccgccaaagcagcatagtcggtggaggatggtgcaagcagtagaggcatcttggccaactggttagatggtagtaagagagctgctggaggtaggagagatcgacgatgttggggaaccttactagagagctgcttcatgaccgtggttgtggagaagggtggttgattacagagaagaggataccggcaccagggagcgacaaaaggttttggtgggtggcggtagtgacggtttggggagcccggcatcgccggcgttggctatcggtgttgaggaaggaggcgcatagaaggggctgggcagcggggattggggtgatgtgactggaatgtgggaaaacaagaggattaggttttctctctttatatatgtgtatcagtgtttgagagttgatctagcccgttgaataatctttatttgagggatgataaaatagattgagatgggagaggattttcttgctaaagttgtataggccgtccccatttaattgtcacagttaaattgtacataattggctatttatggaaaatgcttggttgccacatcgtcgcatgcagtatattttcagcaccatggcctacaaaatcgttattttaccaagatgttttttattatttgcataacaaccccccccccccccacacacacacaaaatgaagatgccagtgcttgaatgcttattgtgacacaaaatttaaataacaaaaattcttatattttagaacgaagtgagtaattgacaaagaataaacttaattaattagttagttaaatatccgtaatctttatgcctttagcccttttgttagtttgtcttcacatcacagcagagaagatgggtggcagcagctagcagacacacttcatcccttccattccagccattccaaaagcatatgcccccaaaatctcagcatccctaccactccagggagaaaaacgaacaatctaggaccaatttaacatgtactagtacaattgttcctatctactactactctacacactgcaatttcttctcccctatctaaatgcagcactagctagcaatctgaaaccctatcaagcttccaaaaagccaattcggtcagcctaaaaacgaaaacggccgtctttgtggttgtggcaaaggcaaaaaggagtacagaagctttgtttcttcttggtctactagtaattcagttggtcccatgcatggcatgctactacttaggtcccttctagaacaaaacagaaaaacataaaagttgtagaggatttaaatcctatatatgggaaataattatgaagcattttaaaacaaaggattgattgtgtcaatgttctagatatgagataccttatacttatgtattatggctaggcgggctcaccatatacaaagtcctatatagaatattgatggttgttcatgtattcatctttatttcagggatctgaggcatcattttgggggatatgatatcttaaggacatgagggttcaacgaatcgactcaattcgagctggttgagagtcggccttttttaaggctcctggaacataaaggtgctgattctaaatttatcattggtgccagtacgcattgttgaattagtgttgcatgaaaaaccggcacctatgaccctttacaagctggcaccaaaggcgttcatttctcagccctcgtttctcattctcttctatttcaacatacaatctatatttatacctaatttaacaccataataattcaaatgtaagaatttaaccatatccgaatatacaattactcaaatataagaatttaaccatatccaaatatacaattacattgtacttctgcttagaatgtgtagttacagtgtaactacgatgttacatcctagttacatcgacagttttttagcgttttttagttaacaatttatagaacgacacccatataggtagtcccttaatttaatttaaaccgtgtgggtcgacggaaaacatggaaggtgtgagctggtcaattggaactgaagcccaaaattttttttcttttaaggaataagttcacctgcggttcctaaactttacatcgagtttgtttgtcatcccttatttccaataccataaatcttcatcgtaaactatacaaaaccgtacaatctaggtgctatagcaatatatatgtctggtttcgttgatgtggcatcctagttagcaaaagaaattaaaacaatgtgaggctcacatgtcagcgcccttttctttattctcttttcttccaaagcctcgagggagagggcggtagccggcgggagaggggcagccggcaagcctaccttggacttaggtcgggctccaaggtcagcaccggcgcgaccagacccttgctgcggctggttttggtactcttccaaccagcagcatggtggaggacaggtttgcgcaggatgaggggcactacatcgacaacagccaccgccacatccccagcagcggccaagaggagggatcctgcagccacgacgtcgtcgtccccaacaaccacgatggtgaggaggactatcacgatgacctcgacctcgacattctcttcgattgcgtagtcgtacctgtcccaggtggccacctcaactcaaatgccgccgtcttcatccccatcaccggtgggagccaggacctctactttgccaacaccaccgcttatcgccacctacatcaccttgtatgtgctcgtagcagccggtcacggtggaagaggtggaggtggaggcggccttggggcggacagatccagctcccccgccctcgcgagcggcagcggcttagggggcgggtgctgccggtgtgcggattcagcgacccccgctcttgggagtagaggaggcgccgccggccgtagatccagcacaccgcctgcagcagtagcccatgcgatggcccatcgccaatgtcacgccgaccgcctctcccctcgcccatctcccgtcggttgcctctcccaccctctccggctggccgtgtggcttgggaagaaaagagaagaaagaagagggccgctgtcatgtgggcacacatatttttttctattctttttgttgactagaatgccacgtcagcgaaaccagacatctataataccatgggacataaatttcacggttttatatagtttaggggtgaagatttctgatactgaggattagggatgtcacacaaactcaacgtaaagttgagggatgctggtgaacttattcctccttttaacaatgatgcactagctcggcccgactagttaaaggccatcaaggtacaaaatgggcttaaaacgcaacaacatggcgacgaaacccatgaacttgtgcatgtgggcctcaaaaggcaacacttgctagtacctgccctatctgccgctgatcggcttatttctgcgtgtgtgtcggtgtgtgtgtttatccggaataagttcacttcgtaaccctcaaatgtgatcgaaatccatgaccctaaactacaaaaccagatatctcgacccccaaactcctaagaccggtgcaatttgactccctcgatggttttggagggtggttttgctgacgtggcgatattgaccgagtcttcgttccacgtgacgttgacgtggcatttacgtggcagcagaattaaaaaaatatttatgggacccattagtcattcataaaaaagaaatatggggtccacatgtcaatcatcttccttcttcctcctccctctctcccttctctctctccccttcttcccctttggcctgcggcgggcgatgagaacgagcagcggcggcctccgcgcgtccgcgcgtgccgctcctccccccgcgcggatggccgacgtctacctccctagcatgcagacggccggcaacctcctcctcgcgcgcggcgctgccgtccggctggcgagctcctcatctgggatgggaccccaacgccgcctggccgcacatctcctgcaaccgcaccaaccacatcaacaacaccgacctccccggcgtacgttgccgccgcgcaacagatgcagagcctcagcctccaggacgaggcaacgtttgatggcaatgaggtagacatgtagagctcgtctccaagggtctgcaaggccaccatgatggcttcagcttgatgtatcagccatcgacccatcatggccgccgacgcaggccgccgtcgatgttgtctggttgatggtgacagctgcggtggcagaggaggaggagctgaccggatgcggcttgggcagtagttgctggtcgcctgcgctgaggcagtggcgtgtcgcgaccgtgcgcaagcggtggcgccgttgtgtgagctacagggcggagcgcctatgcatagcatgggagagaaggggagagaaagagagagaagggagagaaggaggaagaaggaagaggactgctatgtggcccccacatgtcagtgggcccacattttttttttttgtgtgaatgactaatgggtcccacacatattttttaattctgctgccacgtaagtgccacgtggaacgaagactcggtcaatatcgccatgtaagcgccacgtggcgccatgtcagcaaaaccatcctccaaaaccactgagggagtcaaattgcaccggttttagaagtttggaggtcgagatatccggttttgtagtttagggtcatggattagatttcgatcacatttaaggatcacgaagcgaacttattccgtgtttatcctctccctctttggtgcttccgatatatagtagcactctcatgattttaagagaaaaaatataatagtactctctacgtttccatttacgaagttttagcatataaaaattagaattattattaaaatattcattgtgatattcaaaatatttttagagacgtctttcctttcttcattgagtactattcctttgaaggaattgtactactacctccatttcaggtttcaggttataagattttttaacattgtccacatttatatagatgttaataaatctagacgcacatatatatttatattcattaacataatatgaaacagaggaagtacctgttttgagaacgattattatgatgcaattgataagagtagcaatgtaatttatgagttatatgacactttcttgtgagatttgatagagccatatatccgtatgtgttatggtgtctggatgtgaatttctctctgttattctatatgtcatattggttatttcgaacctcatatattaaaaatggcggtagtagtttgatgaattttaaattttcacatgcgcctccgtctcctctcaggttctgagattcagaagcttcagcgtgcatgtatggtgattaatttttcttagaaatattgtagtacaaacacactcactcataatataaatatatgtatgctcatcttttttaatacacacgtatattctacctttattatttccagtaaatcgaaccattattttaattagtctcgtgcatgatgcagagaccctggaaagggcgatcgagaattctctatcaagtgtcaactcactggcactgcacgtacatccatcgtagacaacagtttcacaaggctctcgcaaatgcacgagcatatatatacgtatgatttgtccctcgtccatcgatttaattagctagcttttggtttgtgttgtcgcacacaagagaatgatcaatcatgttgtccacagctgccaatcgatcgatcgagctttatttcgcctttaagcaacatagtagcatcgattgatggcaatatagaccactcccttcctcctcctgctagctatagccccgttcgacaataacataacggatgaagattaagtgttgacatacacaaaacgagaaaaaacacatggttaataatgtaaaatcaaatgtgtttttgattattattctgtgatgaacaattggcatcggagattattggttttgatatttggaatttattcacgaagtggttttggagatgattggatttcacaggtgaatctacaggtactgctggaattgggtctggtcagaccgagcaggtgttgccggtcagaccggcgtgtatcgcgcggtcagaccggcgcagcccgcggtctgaccggccgacgctgtgtcggtttcggtttcgggttgtttgtttggatatccgtgattatttcatgattatggcttttagatggatactatacgtatgtaatactgttgtttgctactaatgagtcaagttggagatagcttggtctcggaatatggtttctttgtttatttcatgtgtaggtgactcgatgcctcgggagagtatttgcggtgatggaccgggagtcggctcggggataagacgacgtccgtggtggtcagagatcatgcgggatacttaggctagagttgatgcacgtggttgatggagattccatatggcatacgatggaggtattgtgtgcgtatgggatgcggagtcgaattttgaaggagtccaaatttagtatgattggttatgtaaaatttgtttcttgtactagagggtttcctaactacaagaaacttgttaatccgtgacggattctcggtgacggatttacatatcatcactgacaaacatacaccgtgacgatattttgtttttcgtcacagatgagcccagtggatattcacagcccgctaactcgtgacatttttatcacgactgtcacaatgtatgattttaaattcatcatacgctagtttgcccaaaacaataaaaaaataaaacatatttagtgcaaagaaaaatgaaaaatgtgattgcaacaagaatcaaacccataagacaatttgttaaatttgaacaaaataattttgttaatatgttaaaaacaataaaaaataaacatatttagtgcaaagaaaaataaaaaatgtgattgcaagaagaatcaaacccaaaagacgatttgttcaatttgaataaaataattttgttaatatgttacatgtatatgatgcagaatatggcaaactaaaaaaatacggtgagcatgggtttttatctgcagcatatgggatttgaacccacacttagctaggagtaggaatgtgtcttaccacttgaaccacttgttctagatgtgtcaatgcacacttaaaatacacgttctagatcatgcgggatacttaggctagagttgatgcacgtggttgatggagattccatatggcatacgatggaggtattgtgtgcgtatgggatgcgaagtcgaatttggaaggagtccaaatttagtatgattggttatgtaaagtttgtttcttgtactagagggtttcctagcttgccgccggtcttaccatcggtgagtcgttggttagaccgctaaagcccggtaaaacataaatcgaagaactcttagagtagtagatgacgactttattgattctctctgtgtttacaaagtgcaccaacaacactccttacaaaaatttcgactaaactcgaaaccctaacttaaaactcaactcaattgctctccaaagcgataccgggaagcctcatgctccccctctatttatacccgaggtaggcagcctaaagtcacgaaccaaactcatactaaaagttctaaacaccttacaaggcgacggtcagaccggcgggagcgaggcggtcagaccggcgacggcaacaggcgcggcaggagacttcggcgatcggaccgattgatctatatcggtcagaccgacggcatccacacggtcagaccggcagatcaatctcggtcagaccgatctccgtcgaatttgagggtaagttttatttccgctaaaagtttttggtttttgggtataccaaccattcacccctctctggttggcttagttattgtgattcgatcctacaaataagacgtgaatgttaggaaaaaacctaatatcaataattagaaggggtgaggcttcgaacccaggtcgcctagcctaccactttgtggagttagccggaacacccctggtgtttctccatggtttattaaactttaattatttcaaactctaaaaattagatttacttcatattttagagtaaacttcacaaaactacagatactttgaccaaattatcacaaactacagatttagggtgatatatcacaaaactacagatttaacactaaatttctcacaaaactacaaatttaaggtagaatatcgtaaaactatatacttagtaataaaattatcacaaaactataggtttagtgataatttaatcacaaaacttgcacgtttataactcaaacataacactaatgctaaggatttaaactctaaaatctgtaattttgttattaaatttgtagttttgcgatactccatcttaaatctgtagttttgtgataaatttagtgctaaatctgtagttttatgatacatcactttacatctgtagttttgtgataatttgatcagaatatatgtagttttgtgaaatttactctatattttataacatcttctatattaaaatatatgtacgaaatataccggttagctgtttaaaaaatgtgataataaaaatgaggtaaaaatttatatcttaattaatcagaaaagaattaggtcctcgacctagctagctctcttattctgcatatagtagagtagttcatgttgaaacgttattcctgctcggttttctgtagagaggaggacgatgcctaatcatggagctcatgaatgttcatggaagctaattaatcagtgcacatatcgatatataatatcagaccgtaaatcttggctgtcaccgcggtgctggtcgtcggacaaactgatcgtgatagatgccggtgaagatgtcgctaatttgctggcacaaacgtttgaaatgttccgacaacgacatggaagtggaatgtcaccaagttgcctccttgccggcataacgagttgatgggggtggattttcagttatacacccttattgtttgggatgccctaactctcttaaaattcataacactacgccggattagatcacctttgacggactcgcgcaccatcatctttgatgggtttgaccctgattagagatgaattgttactgatgactacactcaccccgttaatggcgacagacacctctaatgggcccgtatatttttggctcgtcaaaagtgaggatctccacaaatcaatatgtggttgtaacccgttagagctgagacacctgtgatgggtgcaaaattcacggcccgttagagatgaccccatctctgacgaatctactttggcgcctgtcacaagttacccacctctaacggagtgatataccaaaaccgtcacaaccgaggttacttgtgacggtctttatttacgacctttagtgatgaggtaatttcggaaaaaaaataatttctaaatatttgctagcctcagtatttggtaggcatgctctctaaaaaacagtacattacagatattccaaccacacccaatatcacatatttttacaatttatcacagatgcatcccaaaattaacattctacacatgcattctaaaatcccataaaaattacatagacagtcacatattcccaatgcacattcttacctcacatttcttttgagcttgtgaagccacaaacttacccaatttcttgcattgcacatgaagctgtaaacttacccaaattacttgtagcatatgccttttaaagaagaacgatgagctgccatttaaaaaagggataaaacaattgaaagatacaaagtagcaattattgagtagatgcaaggcgtagtaaccaatttttatgatatgttgttcaaaactgccttaagttataaaaaaacgatagaatacgagatgctaggggtcccaaagtgttttaaacgggccgcggccggtggcctcacctgatacggtctcccgatgaacctatcaaaggtaaggctatccttgatgagtactttggcccatcactgctgggctgtcagaggtgaatagttctgacgtagtgtaaacatgtacattaattttgaaatcaggtttttgaagctccagaaatgggcatggacggaatagcacaaagcacataattaggtttcaagtggaagaaatgatttatgtaaattgcactgtcaatgaatgaactttgtgcaatttaggacatcaacttataaatcttgtgggaacagatgttgtccacgagcccatgttgccctagcagcagttcattatcaggatagatgtcgtatactccaaagagagacaccccagtataggagacaccccagttcggtgtcacccgttggataggtgacaccccagtagtttattccgacaaaatgctagaaaaggaggttaattacgagatgacaaagctttctgtagtgttttattcttacatttattagtggaagtcgccaagctgccggcctaactagcggtggtggaggtgatggattttcagttatcaaatcatatgcattgcgtgggatggctaattacctatcaaaatattcataaacatgtaggtatagttttgaaatactcactccgtttcacaatgtaagtcattctagcatttctcatattcatattgatgttaatgaatctaaacatatatatctatctagatttattagcattaatataaatatgggaaatgctagaatgacttacattgtgaaaaggagaaagtagattttttcagctcggctattgtgtgtcactatattcatcctagccacgatttttatgacttgaaaaattctatagtcagctttgtcggagtaaaataattgccaaattaccactgcgataacaatataatgagttacccgtagtgattattactcactccgtctcaaattataatgcctatatatttttttacacggtgttattgattttgactttaatttatttcatattatgttcttaaaaatttaaaattagcatcatacttagtatatatatagtatgaatcaagggatataatatgcataatacttagtatatatacatagttagtatgattattagttaaaagttaccaagtttaattttttttaaaaaagagatgccctataacttgagacagagggagtagtacatagtacaatactaggctactgcagccacgatgtgctgttttattctgggttgtaggaacattgtagcacatttatttagaccattcattttagatcaagcgatagaaaacgctactagctaatgcgcaatatttttttttgaaactaactacaccagatgatgtgagattttatattaatatagaaaaaactataaaattacagcctagaaaactataatcaggaaaagtgaaaaaatcgcacctccacaccctgacgactcctacacacctattagaggacataaactaacatcgagccaaccgttatacatgactgttcgccatcaactctataacggggttaaggcactccacactataaatttagttaaacttagaaaaatttaagtagaaaaaaaatcaaaacatcttataatataaaaagaaggaactactagctaatacacaatgacgttcaacgctactgtataacgagcagcaacggtagaggatcacaatcttcattggatatatatggtttgagaatagagctgagatagattcgaggcagaaaattaacgaagagaaacagctgaaccgggaaaggaaggtagaattgggagagagtaaatttgtttagtttattgtttttctcctcttttttgtttttctttttatgcacgtgcggccgtcctcatttcgtaccgatcgtgtggaaggcccaactgcagtgttcgtgcttggtaggcagcctttcatttttgacaggaactgacggctcctttgcaacacatgatttcaaaaaacataagcacaagaaacgtaggtttaatatatcatatcttgtgaatttctcgggaaattagaaacatgggaatgttcttaaaaatagtcatttgggtgatacacagggaaaacgaagtaattgtagacacgagaatagaataccaccaagaggtaggagtaggacctcatgtatgttttccttcaaatctctatataaattagttcatttcgtaggattttcatgcatcagtcctctcttccaaatgatttcagaggaatttcatcctaagaattcaaatccttttcctttgttagtcgagcgatgctcctaacaatttgttaaacgatggaaaaaacatttgttgctactaactaaaactctatttctttttatatactgacgttcaatcagggttggatatacagtgtaacggctggaatcaggtgacactgacgagttttggcaaaacctatagttaaactacttattcatatattatagcaccatgatctaagcataattagcatactatgacactagtagatacattatgacaccaacgaatcaattttctagatacgccactgcgttcaatctttatgtgtgttcgtgaaaaaacattcgctgctggtaacagatggagtccttgctagattttggcagcaggcaggcagggtgctgcaattacgatctgtcggattcgatcgagcagggatcgatcgtactcgtgtgtcggccttttcgcctgcatcttgtcgccttcttgctcatagctgcttactcctactacttgtactatttacaagtgcgtatatacagtaccagaatttctgcaacggtttggctaggtagaaaaaatagacctgaacatttttttttaataatgaaaatggattacatctctggctttctgtcataagacacacagccataagtacagccataagtttaatagtaataaaaaggtaaggtaaaagtaaatcaaaatgagaaataaggtgatgggacaaatctccaactcccctttattattgactagcgttaaaccacataaaatttttttagctagcaattctaatagaactacgccacccatagtggaacaagagacccttagctaccgattccaagagtatagcaccattgcgcatagtatcctgctcttcctgtggtagcatcgtaaaccaaaagtggagctagtaggaagatatgaagataacctgtataaggttagataattgtttaccattaaaaactttatcattacgacaacaccaaattaaccaacatatagcactagctccaattagaatcatctttttaatggacctagatatccctctaagccaattaccgaaaatgtttttggcgttacggggtgggggatattaaaagcaaaaaacacacatctccaaacaaactgagtgacatgacactcaaagaaaagatgttggattgtctcttgtgcatagcagaaagaacaatgtttgtccccctccccctctccccaaattttcttttagccaggttattatctttcgttagaattactttcttatgaagaaaccacataaagaccttgatctttagtggaattttcaagtcccacagaattctctttttgatccgaacattacagttcatgatcgtggcatacatagatttgatggaaaattgaccattcttatggagcgaccatacaaagctattcttttcatttgacagagttatattagcccgaggatcaaatcgttccactcgattagcttttggccaacaatagctctcctaaaagatatatttagcggcgttgtgtgtaaaatcaaaggtgctttttattattattctgtgatgaacaattggcatcggagattattggttttgatatttggaatttattcacgaagtggttttggagatgattggatttacaggtaaattacaggtgctgttattttatgtgaccggtcagaccgggcagtcgttgccggtcagaccggcgtgtatcgcgcggttagaccggtgcagcccacggtctgactggccgactctgtgtcggttttggtttcgggttgtttgtttggatatccgtgattgtttcatgattatggcttctagatggatactatacgtatgtaatattgttgtttgctactaatgagtcaagttggagatagcttggtctcggaatatggtttccttgtttatttcatgtgtaggtgactcgatgcctcgggagagtatttacggtgatggaccgggagtcggcttggggataagacgacgtccgtggtggtcagagatcatgcgggatacttaggctagagttgatgcatgtggttggtgaagattccatatatggcatacgatggaggtattgtgtgcgtatgggatgcggagtcgaatttggaaggagtacaaatttggtattattagttttgtaaagtttgtttcttgtactagagggtttcctaaggtgtttaggacttctaatatgagtttggttcgtggctttaggctgcctacctcgggtataaatagagggggagcgtgaagcttcctggtatcgcttttgagagcaattgagttgagagttgagttagggtttcgagtttagtcgaaatttttgtaaggagtgctgttggtgcactttgtaaacacagagagaatcaataaagtcgtcatctactttgagagttcgtcgatttgtgtttcaccgggtttcggcggtctaaccggcgacacaccggcggtcagaccagcggaatcgcggcggtcagaccggcgggtacacggcggtcagaccggcagcggcgacaggcacaggcaggcgactttggcggtcggaccaatcgatctacaccggtcagaccgacgacaaccaggcggtcagaccggcaggacaacttcggtcagaccgcgatccatcgaattcgaggataacttttatttccgctaaaagttttcggttttcgggtataccaaccattcacccccctctggttggcttagttattgtaatttgatcctacattgtgctcataacttttgccacagtagactgtttctttcgaaaatagacctgaacatgaaagagtgatcaaactagtatatcactcttgatcttaagaatcaatttccttttactcttactagtaacaatcaagcatagtgattgttgtgattgcatcattgcaatttgcaagcaagcttcgatatcagaatcgtacgtaagtacgatcagaagcccggacatgtttacacaatctgactgaaaaataatactcctacatatcaatcccaatcccaacactcttttcttcttaaatatccggtggaactcctgtcgtcagttcttaaaagaaaatcccaacatgttgcttcctacaccaggagaagagaaaaacgaaacttcagagagttcagaagagagatacaattcgacacacaatctcattcaccaacttcgcaaccactctcttgcaaagacttttgccttgcccgtcagatcacagatcgacccgatgaccaagacagtagtaatttgatcaggagtgcgtggtacgttcactgtgcaggcaatcaagtcaaccgggcgtgccggtttggattgcttcatggcctaccgccccttgcttttctgtttcctgacgaaccaaacattcagagattcagagagagagaattgtgcagttggcagcaagtcatcgtcgaagaaaaggaggacgcaaaacaaggggcccatttgagaacacacacattgatgcaatatcatcctcttgtcacatcacttgcaaaagacataaagaatggtcctttggttcatctagcttcgcaagcaaaaactctcagaactctccctctctctctcgctctgcgcaagaagctgattgaacctttcgtgcatgcatgcatctcgtttagtagtatttagtatctgtagcaagagtgatcaagactagattaggactagcttaattagcagtccagaaaaggaattaagttgttagttagtaagtactacatggttagttaccacttccattatctaaaaaaagggttagtacatggttgtcgcttttggtcgagattgcaaacactgaactttcgctgttgacactgaagccccttttcttatctgatctgtccattcagctgctgagaggtagcggccggccgccgtgatttctctgcctaattgtttttttcttctccatctcaatctctaaaatgacgtgcaagaattgtcaaaaagaaaacgttgaaaacaaggcagattactgaactgaatactgaacacatttttttccatggaagcctaacactactgcgactaacataatcaatcttggattggattcaacgtgatagcagtagtcaatgactgaccaagattacattggagtactagcctgtatgtatgtgaatgcaatctgactacatgcatcagcatctactctgataggctcttgggttgcaaataatcgccattattaccaccaaataaaccggaagatgcttgacaacgatgaagaaattaaacttgaagattactgagacagcatccatagaaacagcagtatacacactgtatctgtatgtgtcttgcatcacaaatgttacgcaaaatcacttcttttttcatgtagttctacaccttaatgcctaatagtaattctttcttttcctagatgcagatcatgagtacgtaacacaatagtggattaaattatggcgattaaaagatggaggtacacaaaaggaatgaagaaaagagaaggagggtccggcagtcaaaaagtactacatcaatggttagacacccttcccaaactctcttcttcgacatttttttcaacaaccaaatccatcatcaaaccatctgcatgctgcaaaaaagcctcattttcagacacacaaactctctctctctctctctctgtgtctcttctctagtagtctagtcctctgttctcgcatcgatcagatttcagatcttgcatgcatggagaagaagcagcagcggaactacgcatgcagatcatcagaaagccaagcagtagctgcatgatgtacgtaactgatgtgtgcagctatagctgtagttgttgtacactcgtactcgatctcttctagcttttagaaaagcaggaaaggagaaagaaaaggagtgattgcagcagaggcatcaaacacacacagcagcacacctagctctgcaccgaaaagggatggcagcaaagccaaagagtggagtaaagatatgaaataactccaacgaaattcagaccaccaaaagactgaacaaaattcagagcacccagtgtttgtgttttttttttccaaaagagaagagaatgccatgaacagccaacacatttgacagagagccctacccaaaaaaaaggaaaagaaaaaaaagcttcttcatgtacatcatccttgatcctactgtactatacctgcggcttcttcttcttcttcttcttcttgccgaagtgtatatactgctactgctacgtactactactactactacatgtgctactgctagtgctagctacaattaattaaccaagaagattaatttcgatgatatctatgcaactctgatctctctctctctctctctctctctctctctctctctctctctctctctctctctctctctctctacatgtatcgaattcatgggttgccttggtcctcggctccaatggcgttgtgctgccgggacgggccggacggcggcgcggggccacggggcaagaacccgaagaagttgttggagacgcctctctccagcggcctccccttgaacggctgcatgcctcgcgtcgcctcgcagctcgacgcctgcagcagcagcagcagcagcgccgctaccaccagccaccaccatggccgcctcctcctcctcctgcttctcgtctgcaaacagccggccatggcgaagacgacgacgacgacgacgaccagctagacacgatcgagctagcaaaacgaagcgaggaagaagaagaagaagaagaagaagatgatgatgatgatgatgatgatgatgaacactagctagtgtggtgtggctgtggtgatgtggagaagagagaagagagaagagagcaaatggtgagtgaggggagaagaggggtggagatatatgggttagggagaggagggacagaggagtagtataaaaggatatatgtgtgacaatagaaattaaaaaaagggatggttgttaagcttagttatatagtactactagtgctagtattagcattgcattatattagtataggatgggatggagttgttcaaacctcaaagtccaagggggaggaaacaaggggagcatgttagagcaagttaggcattatgtttctcctcctttcaaactcttgcttaggaaattttccatgacgtaccaaggaagaggtaccatgagggaaaaacatccatgcttggttgtagttttcccacctcaactttgaacacaggaattttcgttttatcagttcccatgggaaattaaatcaatttatataaaattcttgttgatgaaataatggtttgcgcatttcttcaaaaggaaaaaaaagaagtaaaaatgattatatatgcagacgatcgataatatgactgtaactattactccctccatcccaaaataatttcatctttcctccactcatttgtcctacaaaatacatcgtattcagatttgataaagttaggacaaatgcactaagacattataaatttgtgtacaaatatattggggtttgataaagttaagacaaatgcattgagacatgataaaagttgtggacaaatatattggtacttgataaaatgggataaatgtattgggatttgtttgagtgaagggtatttcggtcttttaaattttgtagtatatgtaggatgggctaaaaataaaactattttaggatggagatagtattctattaggacgattatgcacaactatatatttttctagtgcacatttactaaataccatttatgaatttaaggctttccaaaatgaaatatttatatataagatttatgattagatacgaagcaacagttttattaatattctaatatgccctcaaagctcaaagatatagcagcatcataaattgaattgttgaccctgaggattaatctacagatgataatttttggggaaagggtgacgatgaaatatgaaaaacactccttctcacattggcaatgtggagtaaattttaggcgcgtaattttttgttttataatttttcagtcactaactaaatgtccgtgcattgcaatggcaattaaaaaagaaaaacctgtcgtacactttaaaggctaaaaaattaaaattattgtcattgtaaaatctccggttcatattatttgtcatcatttttcctcacttcaaaagaaaattctctctaatgacttggagttggaaaagaaacaaaagtttacctacatcactgtttggggatcccacgtgacaatgatgaaggatggtgacgagattcaccactcaccatcatcattggggtcttttaattaaaggactatagatttaaaattgcaacacttctttttttttgtttgaattgatacattatgttttgtgaaagtttcaatacttataacttttaacttaagtatttacatgatcttcttacaaaacatgagcggtcaaaatctaaaaatgaacagtgtctatatagtgacaatgtatatattcgaaaggcagtgtgaagtaacgtgtagtttcagttttatttttaattgtgaagtcactgagggtgtgtttagttcacgctaaaattagaagtttagttgaaattagaatgatatgacagaaaaattagaagtttatgtgtgtagaaaagttttgatgtgataaaaaagttgaaagtttgaaaaaaaattttggaactaaacaagggcgtaattttgcatactgtcggcatgcatgttgagtgttgacaccgaattgaaggagggagctagagctagtaaaaagatgaagcagacatagcgagtacaaatgggacgcgatgccccttctctgtcgacggtatggagagcaggatttttgctagctaggctacagtgacatacatatctatatatccacattccacgcccttttgaaacacaaaatatcgatcgattggatggggacaaaacgcatataaacatagcaccaagtatctcggttgaatggagagatttccgattcaatagctagctactttctccgtcccactgtgtaacaatttaggatggaattagatatattttactacgaatttttatagttataggatgaatctgctatattttaggatagagtgagtagctttgactttattaccagtcaaaatttatcaagtttgatcagtttatagaaaaaaatagcacatctaaaatatctagttagctttattaaatctaacattgaatatattttgataatttgtttattttatgttaaaaatactattatatttttctataaatttggtcaaatttggagaaggtttgattagaaaaaaatcaaacaacttataatacgagatggagggtgtagctcctggttaattagcgtaattacatcagtacatgtgcatatgagattgcaatttaggacgacgtgtactacgtaatggctatgcgtatgcggtatgcctaccatttcaagtcaaaccgatcgggtacgtcagggaaagctaagctgcgctgccacccaaacccactgatcgtacgcgccactgactgcccctgtacggccaaaagctgttggcacaaagcaatctgaatttttttttggaactttttattttcaaaactgaactctcctatacaaattatatccaaatctgaacttttttatcacgactcgcatgacgaggttttttcatgctagttagagtgtggccgcccactatatgcggtgggagtgatggtgttgtttcgtcacacttgaaaataggtttggaaataggtttttagggttcttttttggaataaaaaatgtttttaaaataaaaattctctactggtatttagctagtggttgcgtgctgcttggcttggcgagagcaactacgtactccttctgtcaaaaaaaaaaaatccaatcctcagtttgaatctgggcgcgattcaaaccgaggattgaatttgttttggaacggagagaataagcatcaccagttcatcactgcgctgctctctgccaacatctccccgtctccctatctctgttctgcttgcttcttccacaatgcctcgtttgaatctattcatcgctctttcgacaaaggctatactattattttctaatcaaaatacagatttatcttgattttcgtcacattttcaaacagctaaatagtgttttcgtaaaaaactttctacataaaaattattttaaaatattatataaattcatttttaagtttacaataattaaaacttaattaaaaatatactaatgatttttttgtttgtatatttcctccgtctctaaatataagagattttggttggatgtgatatattctagtacaatctcttatatttagagacggagggagtatgtcataatttttcaatcttcattagacttcatttcgtgtttgtatatttcgtatagggctagcccaacgtgtgcattcacctgcgctagctgctactcctaattaattttgccacgtctgctaaactaaagagaattttttttccttggccaaattagttaggctggtgggttactgaacaccgatcattacttcattagcattgtcgtcgatctactaatgaatacacattttttttataatcttcagtacaactcagaaatagtaacgattaaagatggacggttcgaccagccagtaatcagaccggacagctccggatggttcagaaagttcagacaagcagcccaaagtaacccaaaattaacgtacatgtgcgatgaaatgagaagttctcagctcaagaacgcagtgctctgttctcttctcttctcatgattaaaggaagatgccacatatgatgatcacacatggaacaacagcgagaaagaaacacaaaaattaaaacaaactgattaaacacttgtgcagggattcatctacagaaaatacgtacgtgcgtgcagcgaaagaaacactaatccaggtcgctaattaagcagagagacagacaagagaaagaaagagagggattaaattaaagtttggcgatggcaaagcttgtgcctgcaatcatggcgcacggtctcctcaaatgctcgtccgctaatgaagctgaccgaccccacggttgcctttctgtcgcttgcagtcaagtgttccaaacgaaaatgcaggttgaaatgcagcagcaaaccccagggtttcagcaatctgctgcagaattttgcctgctaattttgtttaagataatgatttttgcctgctaatttaatcatgttagttatctctgacagtatgcagatagattagtaggaggagattaacaattttttttctttttaaaactagaagtattttgttgttgcttggtttgttcgattagtgtggtcacctaactagtaaacagtttgtggctacaggtagccctgtactgaatcctcagacaaagcaaaggcattgctgctctgcaaaagctatgcaacgccacttaattatatctcgagccgaggctcctctttccgctgggatagccccagccccactctccatcgatcgatctcatgtccttgcgaaaattattgcagattcttatgcctgcatgcagtgctgctgctaatgacatttttgcatcgcaacgtattgctgatcatgaaccataataatgtgctagctttctgctcattccaacgaattactgcattacaggttcagcatttgcatgataaagccaagatttgtggtgaactatcatcgctgcctaggattcagatgcaatgggagtatatctgcttggtgggtaggcgttgaaggtcgatcttatctgacaagaccctgactgaaaattgtcaactctgaatgttaaactatatatcgctcccggtaatgcgtgagatcttggaatgtcacatgcatggactcactcacctcttaataatgcctggctcctgctgctcaattaatcaaagtcttttcagctagtatctcacaagaaacaacaggcttgcattgcatcaagataagcttcagactcgcacaccagcaaggcagcaatcggcaattcacagcatggctgcgcctgcagagacagcagcagcaatactgaaactaaattaagtatacctaacaacgatgtgcaagctgacacaagcttcataggaaacaggagagagactgacggcttctgaaagattagaaaacgtaggagcgacaagaagctggccagtccgacaaagagtttgcaaccggacgatcaagatcgacatgggcacatctgcatggggagggagcagagaccagtgaatactgaatgaagagttctggcttgcttgtcactgcatgcagagtgcaggcctgacctgtacaaactacaaagggctcctttagattgcgacagggagagctggaatccacctcgtagaacagaagtagttgaagtactcctgcgtactactatcttcctcttaaaatagtaacatattcattgtatcctcagattcaaaatgtatctcatcttatactagcttgatatattttaaaacggatagagtaacaatgctactacagagttgttaataagggacaaaataattgtatcccatgtactttctttgtctcaaaatataaaggattttggttaaatataacacatcatagtactacgaacttggacaaactatttatccaaattcatagtactaaaatgtgtcagttctgataaaaaaaatttatatattttttgaaacggaaggagtaaactcttgacattttaggattgaaacttaggatatgtatcgcatgctaaatgttaggaacgttatggtttggttggttgatttaatcgtggcgagccatattttactccaaaatctattataaattaaataatttagatttattttctattattagaagcaatgatttagtttaatgtttagctcaacatacatgtctaaaatattatgcaaatgcgggctgatgaatagcccgcatgaattattttcttttacttttgaggctttaaaacatattgtgatgtaggttatacttcattatcattgcaacgcacaagacattttgctagtagaggtaaaaggaagtagtacgttgtctttttatgcataaattcataatttaacaaaaggacatccacaatgaccacacaggcatatgctacagttgagtcatcaagttggagttgcatcacctaaattttactgttgtacacactgttcggttgtaagtatatactccctccttctctaaatgtttgacgccgttgacttttttaaacatgtttgaccgtttgttttatttaaaaacttttgtgaaatgtgtaaaattatatgtatacataaaagtatatttaacaataaatcaaataataggaaaagaattaataattacttaaattttttgaataagacgaacggtcaaacatttttaaaaaagtcaacggcgtcaaacattttaggatggagggagtattaacaatcggaaaagaacggaagcaggttgaacgaaaaaccagaggaagttaggccatgaccatgaatcaaggagaaagaaatggagccatccatatatacttggaagctactagctagctagtatatgtactgacaagctagcatgccactgcacgaacgtaacaaacaaacagagattggcaatgccgcaatggctcaatcatacgcaaacaaacagcgactagcaatggcaatggctcaatgatacggagtatatactatcacccgttctagctagcctgccctgcctataaccaaatgctagtctagttttggtttggcaaaaaaatgaacatggggattctagataagttttaacatgaggtccaacctgttgaaaaataatacttagtttacctctcttctgatttctattgtttttctgtgtttcatctaaacaatcatttctgtagttctctcatgctttattaattcatacgatttgagatgctagggtagtacaattatgtttgtttttttacgattatagtgtgtttaagaatcatgtgttccaaatgagcctttagattcagtgagagtagtgagaaattgctttgtaattttccaaggaaataaaaacatggggttggagctcatgtttgggctcctttcaaacgcaggaattaaaaaacatagaaacagtaagggcccctttgatttggtggaaaatcataggaattttgaaggatttcaatcctatagaaaaatttcctatgaagccatttgaagcaaaggattcccatagtatcctttgaaaatttctatggaatggacaatcctatagagattttggaggaaatttagcaagaactccgacctcttggaaactttcctttgagtctatctctcttatccaattcttgtgtttttcctgcagttcaatcaaacggttattcctgtgttttcctacgttttgcaatcttctgttttgcacttgcattcctattagaatcctatatttttcatattcccccgtttttttattactacgattcagggcccatttgatttgcagaaaaaacataagaatttgggaggatttcaatcctataggaaaatttcctataaagccctttgaaacaaaggattgaatcctatctaaggccccctttgattcaaaggaaattcataggaattttaaaggatttaattcctataggaatttttcctatatagccctttgaatcaaaggaatgaatcctatggaatcctataaaattcctatggaatgcctcttcccatgcaaattttgaaggaaatttaacatgaggttctacctcatgttaaaaatcttttgagtctttctctctcctcaaattcctgtgtttttcctgcggctcaatcaaacggtcattcctatgtttttcctgtgttttgcaatcctctgttttacacttgtattcctatcagaatcctatgtttttcctattcccccgttttttcattcctgtgattcaaagggggcctaatcctttgaaatccctatggaatggagaatcctaaagagattttggaggtaatttaccaagagcttcaatctcttggtagcgttcctttgagtccatctctctcatccaattcatgtgtttgtcctacggttcaatcaaacggtcattaatgtgtttttactatgttttacaatcctctgttttacacttacattccaatcaaaatcctatgttttcctaatcctgcgattcatcaaaggggccctaaaaacgtaggaatcgagatggcatatctagtttattcttataaattcgaaaatacaagaattgtgcgaatattgttgttcaaatgttccatatgaaagtataagaatttggagagagatagaccaaaggaaagttttccatgaggtcattaacatgaggtatgacctcatgtataaaatcctctaaaatccccatgaattgagccattccataggaattttgtaggaatctcaagtgctattcctatgtcccaaaggagcacttagaaaaaaatttcataggatttcaatcctacaaaaatcctctactttttctttcttccaaacgaacccagaatcctttgaaattgtggcataggaaaatgaattttgcaagtctaaatcttgcaaaaacaatcaaaatatgatataaataataagaattccaagtccctcattttttttcctttgaaaatgctctaatccaaaggagcccgtagtgtagggctgtgtgtagctttgtagttttgtagtgtagcttttgcttcgagtaggcctgagacaaggagagcaaggcccaggctgcaaagctagtacagagtgtgagaccattctactcgttggcagtttttttttcaatagttttataaacaaaggaatggaaaaacaattatcggtagagagcctgatgtaacagctaaagcgagcaactgggagctcaagtaggtgaaatagtttcttcctttttttctttttttttacaggaagctcgagttaatttattggcctgaatattacatcagcccaactaattatagcccataaaggcactgcatgtcaaacattattgtattgggccttcggtttgttgttggtccaaaaaccttagtatagtggaagaaccttagaaggaataagttcacttgagatccttcaatttgtagcccagtcttattttcgtccttgcacccaaaaaccagatgggactcttccatcctcccccgctcccacggctgcgtcatccaagcgggtgacagccggccacctgtggcttgcgggctccaagaacgccgatggcagcagatcaagagggagaggaacgcaacgaggacagcgggcgcggcgagcagcgtgagaggagtggcacgcgacgcgtggtgagagcggagaggccgctcttctttccctccagatctgactgacatgtgagttccacattttttgttttaatttttatattttgctctagcgccacatcaccgttacgtaggatgaggaccaagtcaaactagttacgtatgcgtcacgtcagccaaaaccaccatccaaaccgcagatggacctcgtttgcactagttttgtaagttgggggactagttatatctggtttcgattttactatatatttgtcgataaattttctctcaaaaatttgacagatgtaattacaatacaatcgtagtgtaattatattgtaacttgcatgtaattatactgtaactataatgtaacttgtatataactttcaaaaatctctacgtaatatgttatttcggtaaaatagaggttgtgagaataaatccttacacatatatgtgtgctgtgattttatttttcttcctcaccaaaacaaatcttgtaatagatctaaagattcaaaattacatgaaacttatatacaagttacactgtagttatgtgcaagttacagtgtaattacatataagttacagtgtaattacactacgattgtactataattatatctgtcaaatttttagaagaaaatttgtcgacaaatgtataggtggtataattatcgtaccacctatacatttgtcgacaaattttctcctaaaaatttgacaaatataattatagtacaatcgtagtgtaattacactgtaacttatatgtaattacactgtaacttgcacgtaactacagtgttacttgtatataagtttcatgtaagatttgtttttgtggggaagaaaaataaaatcacaacacacatatgtgtaaggagttgttcccacaacctctattttaccgaaataacatattacgtagagatttttgaaagttacatacaagttacactatagttacagtgtaattacatacaagttacagtgtaattacactacgattgtactgtaattacatctgtaaaatttttgggagaaaatttgtcgacaaatatatagcaaaatcgagaggtgaagagtattggaagacatttgggtcccactattttttttttggctaacgacggatcccacatattttgttttattcttttagtttttaattttgttctttttttggatcaaactgccatgtaaacgttacatcaatgacatcaatgctatgttggacaaagatctaatcaaagacaccacgttagccaaaactggagacaatattatcgagggatctcgtttgcacggttttataaattgagggatggttgtatctggattttcggatcaaggacgaaaattaaattaggcaataaattaagggtgtgtttagttcacaccaaacttctccccaactcccaactttccatcacatcatatcacatccaaaactttcctacacacataaacttctaacttttttttctaaactatcaacttttcccaaacttctcttcaattccagaaactaaatacagcctacgacacctaaagtgaacttattccgtggaagaatcacaactctcttcacagattctgaaagtctgaagtccgaacaacagctagctactctgaacaaaacccagctatcaacattttctcaccggggcctgcgactttggcatttgctgaccggaccatctggaatctatctatctgaaagctgcagcagcagcagaagcaggaagcatctgcttcttcttcttcttcttccagagaacttgtgaaccatgccgacgccaagacaaaagccgtgtgaaaagctgacctatgcaagaaactatcgcagtagtcaatctgggcttgcaacttggctatctgatccgcagccagcaagcatggcggagttgagttgtgtgtgtgctctgctggcccgcggaatgcaccgaatttcaacggcatagttctggacttttgacctttggaaatgactgcatatgtaagtatgaacacgtgttgcgtgaagaacacaaggtgcttttaattaccatagtccatagtccgtattacccacggttttaaggctgcattattaagtctatcttcccgcacatcctttctaaactgttaaatattattctttttataaaacatctgtagaaaagttgtttttaaaaattacgttaatctagttttaagttaattttaaactaatacttaactaattatacggaatgagttgctacttgtccagaagaaagaagtttccaaccataacacatgaacacagcctaaatcgtctaattagtggtatatcacattcttgaaatatttttggccggtatataactcattagtgactgcaaatagtactcacacgaacactattcacgtgcagtcaattttttttacttgtataaattgaatatgatttatctatcttattattttttaaagaaaaaatgtaagttttgggcaacttgcacaaacaagaacacattccctagaaagtccacctcagcttcatcttaactacatgtagtcaagcaattttaaccattgatttgttttccacatccagacatcctagttaatactcactccattttgaaatatactctattataaattatattatataatagagtaaagcgtattttattttgttagaacaagactttgataaacaattactctattataatataatttttgagaagtaaaattaatgttattgtattcgtcttcaaaagtaattttgcatgattatacttttgtatcatataagtatataaataaggaatcaattttagtttaagccttaaccttacaaaacaaaatacgtcccatattttgaaatggaaaggataaattgcagcatatttcgaaatattctgaatattccatgatcatttaagtggagatggtctaaacactaatactattgtattaaaatttgaattgtacagatttgagcacatatttaagattttaaatgataattccagatgtagatacacactatttcgaagatgtaatactaatttgaagaaagcaacattttctaaaacgatatatataaatccaaagtttccaaattttaatatattaggatattaactaatatctaattaagacaacattcgtgcattccttattaaactacaaaaattgactttattaaattaaatagcaatgaattagccctagcccttgtatcaatgtctctaatttggagtctctccattttaaaatataagtagaatgtatttatctttgttaggataagaatttgactaacatagtatgagataaaagagcagcaccagccctttgatcaatgtcttgtgtattcccaaacaaaagacattaaaaaggttgttctgagttctgacctgcgtcgatcgatcgagttctagccttctaggtccccagtgctgctagctttcggtcgtttccattaacctttttcttttcatgtggttggtcgcaaaagcatgttcccactgtattgtaaccaaaccttattaaaatttctcgccaaaaaaacatactcctttaacttttagttaactttgatttggaactagcaaagttttttttcctaaccatagcatatcatatatataactcctttttcttataatagtggctggatggagtactaaaggaagctaataaattaatcacttcgttgtggttgggattggccggccgggttactgatcgattgactaattttaatttggggttgacaatacaaggaggccggccgagattggtggtttacaatatatagctgtggaggagaagacataagaatagatttggttggaccgaaccgaagtacagtcgttcgtgggatggagcaactcaaccaaaagcgcacagcatgcacacaatatatgcaaattatcgcgctgtccgtcacagcttcgatctccttttttttccttttctcaacaaaataattgaagaggtcaaagctaactactgtacagctctcgaaatgatttaaagtcgtagttggtgagtgataaattatgttttatctaaatgtgtacagtgcttcgacggcatgcatgattagtttaattttggttagactagcaaaagtgcccgtgcgttgcaccgggtgattacggagtgtgtatattgaccaaaagtgttgtttggtctagcaaaagtgcctgtgtgttacaatgtgaagcgtacagattagaaaaatatgcaattaattaaaatacaaattcgctgaaatatttggtatttttaagtaggtatgtgtataattaaataaatttacaagtaaagcaagtgtgagaaataaaatgacatggttaaatttaattttttttaaattctccatgattagttacgctctttgaaattatatttgaatttttcagagcttaattgttaattttacgctctttgaaattatatttgaatttttcagagcttaattgttaattttattaatacaaacgtcatttaacaattatttacttggaaaaagaaagaaaatacttccttttaggtttgcttcgaaataaacacattcaataacttataattgtaatgcttctgaaaaaatgagcactaaaaatgaacttattctctttttttgggcctgagggacctaaaatagacttatttccggcccttgccggtcggtccacggccttttgtgcacgcgcaagtgcacttcccctccccaggccacaacctgggcttgggccagaaaagtggcctcactctcgatccctcttgggctgatttcggcctggacgacaccgatcgtccgatctttagggttttgatcggacggccgagcgtcgatatcggggaaacaaaacccctccttctcctcagccgccgaaaccctagcccatttccctccctcccatctcacatcgccgccctcccctccgcgcccccgagcggcggcgacggcgcccctcttcccgcgagcggcggcggcggcgccctcccccacaaccaacggcgcggcgccctctccccgaacaacggcggcgtggaggcggctgcggcccggcgggagcgggaggggcggcgggccggacctcgcctccgccagatctggcggcatggaagcggctgtggtccggcgagggcaggagaggcggcggcgtcgtctctttctctctctctgtgcatggtggggaggtgcggcagtggtggtggtggcggacgtcatggaacgccggtcgggcctcgcctccgccagatccggcggtgtggaggcagctgcagcccggcgggggtgggaggggcggcgggccggacctcgcctccgccagattcggcggcatggaggcggctgcggtccgacgggggcgggagaggtggcggcgtcgtctctttctctctctctgtgaatggtgtcggttctcctggtgatgctaaccgaataggacttggtataacagatgggagtttgtttcctattttcgtggaatcggacatattctttttttttcccgatttttcttttaccgcgttgatgaatcggattcgttccggtttttttttcacccggtttttttgacggacgatggaagcacctcttattttttaagtagtagtagatatggggtgatgaagtaatgcgaatcaggagcggagacaggaataacaattctaatcttctactttaatccattagaattgtagtactttaaaacttcaaaaaacaaaactatgtaaattatacattagttgagtcttagacttagaaaaatcctggttccacttgtgcgaatgcagtgtacgtgtacactcagtatagcatatcgtagcaacattattagtcttggggaaaaaaatcattaacgtaacaattgtagagacgcgatagttagctaaggggcggatatataggagtagagtcttactcttatgcccaaatatccatagaaattatacttcaaaaattgaaaaataaaagacaaatttatgtagattatagtagttcagccttactcttgagtacattttggctccgtcacggggttagctagctactttcgtgttttagaatataacagatgtaatacattttattactatatgtttaatcagtgtagattgctatatattttagtttaagtaggcagagaatgagagagaaaaatatccaagagcgcggcggaggcaaacagtggcgtgaccccgatggagcgagctgcgttggagccgcgagcatcacacgtaagctagagtacgtgccagttttgccagttggcagctggcactagctagctagcttccagccgcccgtctcggactcgatccgcgtaggagtcgatcgactctgtacctggacgacgacgtacgtacgtaccttcgggagggatacggaacaaaacggcgtcgcgtagcgctagtcaagatctagaaacttccgcgcgcgccgatcgatcgaccaacacacagcaggtagggagacgactctgcttcggaactccgatattccaccgaatatcggacgcccaactgtttacacgtcattacaccacctacgtatgcagcatgcaaaaaaagaatcagtcagttaaatgttccagttaactaacgagtgaaacatcaagttatatagggtgaaacaaaaaatcagcaactgaaacatttaaaaaaattatgaaacatgatgaagatacacgttaaaacatatcgctatcacaaataaaacaaccaatgttaatggattgaaacatatgtttttctttcatcaaaatataatcatgtgatatcttgttgtaaagatttaattacaaagaatacaacggtgtgatcgaatcgtagattgaataattagtttaagagaaaaatcgttttgaaactagctaaaatgcatgcatcatgcatgtggtggagagagagagaggagagagagtagtaacagttattttgtgaattttgtgaaacacgctgaagacacatattgaaacatgtccctatcacctataaaacaaaaaagtgttaatggattgaaacatatgattattttttatcgaaatataatcatgagacatcttgttgtaaagatttaattacaacgaatacaacggtgtgatcggattgtacattagataaataatttaagagaaaattcgttttaaatatcgttaaaggtgcatgttatatggttagagatgtgtatatgtgtcagaggatgctatccgatttttcaacttgcttcggacgttcgaagagaagcattcaggtaggtggccacggttaacgtcgcagctagctagccaagcgttggatatcgacggcgatagatagatgcttctcaccttcaccgcggggccagccgcagtcaaatcccgcccccgcgtagtcgcgtactagtagtacacgtatttggagacactgagagcaggtacagtagcagactataatccatctataaatatattttaaagagataagataaaagagaggagaacagcgggatacagatctgtagccagctgtagcacggattttaagacgtactatgtgtattgtaggtaggaccaaatattaattgtatagtaagtaactattatataagatgatttggagatagtagtcggctatcctattaaacggcacggcgttttgcctgcgtgggcggtggcgccagcttggcgtttggccgcatgcatgcgtacgttgctacaccgaccttgacgccgcccgatacgtacgtagcgtacgtacgcgccgtggactctccacgtacatctcgatcgactggccgggccgggcgtgcgggtcaaaaccgatcgatcgatcgatcggttggagtaaaaacaaccgattaacggctggactagctagctagtccccatcgattacgctacttcgtcatcgatcaatattacggtaccatatgcatggtccactgtacattctgtacacgataaagtcaacaaatcgccgggccggtaataagtccacaaggccgccgattgcttaattagcttctcaccaggtctgagctagccgtcttctctggaggggttaacaaacaaattaatgagtaataatatgcttctagactcatctagttcaacagttttttcttctgtgtcccctttgaaattcatgaccctacgcaaatgatctagggtctgtgatttaaaactgattactcacttgattattttagtgagataaatgtaataaatatttttagaaataaacttaataaataattcagaacatatagtctaactaatacaatactccctccgtcccaaaaaaaaagacaaaccctggtttccgtgcccaacatttgaccgtccgtcttatttgaaaaaattatgaaaaaaattaaaaagacaagtcacgcatagaatattaatcatattttatcatctaacaataatgaaaatatgaattataaaaagatttcatataagacggacagtcgaagttggacacggaaatccagggtttgcctttttttgggacggagggagtacaagatagcttttttaaaaaatattttttagaagcgtagagcaaataatctagtattaatttctataatgaagtttgcttttttttcttaaaaaaaaaagaaaccgtggtcagagttttcacctaccactttagtttgcgtttaggagcaggacgcctaggcaacttcacacgcattatatatgtgtttgattatatagttgtgcaatttaatttgtttcactacttctaaaaaaaagaacaactatattcagcaagacgaagacaacaaaaacccaaatgggaacactagcgacgtggtacgtacgcatcatgcaagtcaccgcccaaattgcataaaccaaagtttaactagagctatcacagcacaatttcgttaagcaacatcgctggagactggagagtactgtagtatgcaaattgactattgccaacggggccaaggcaccaaaaccggtccatctaaaattctactcctctttactaaattataagtatatatttttttatacgatattcaatggtatattttgattattaattcattttatattgtatcatcaggatgtataaatttagtatatatcacatgaaaacattttaaaatacgaataatcaggggcgtcccggtcaaatcgggttcccatataaaatattaaaatggggtcctagtagcctagtaaattttttatagtaaaatttaaaacgggcgtggcgatcagccgatcatcagcgatgaagtagaagcggaggccggaggggattggggagaggagacgaagcggctgcggtgtcgggacttcggcgatacgcgacgacgctgatgcctggacgggagtacgatggaagatggatcggttcaccttctgcaacgttttgggccttgttttactactatttagactgcaaattaataaaattaaagcctctaatattattatatatgggacatacttaatattttaggggcccttaaaatttgggggccatgttcagtagcacagcccgcacaggtccaagcacacccctgcgaataataatataacatacacaatacttgatgtagattttggcttgctagcgtaattattagttaaaagttaccaagtttggtttttctaaagataaggttgttgttgtataatttgagatggagtgagtagtatgaagatgaagataaagttgaggtacgaaaaacaagaatgccatcagtataaaattaattgagttttcattattacaaacttggaaaatagatttatattttaaagcgactttcgtatatatagctttcgtaccaaacacaccgtttagcagtttgaaaaacatgctaataaaaattgaggtaaggactagtagtatactactatgttaattaaagagaaaaaagaacatggtcttaacgagagggtataattaaacaggtgaagaaaatgagaagggaatttcagtatctctcatctcgcctccagtggcagcaaaaacaactggcaacgggaaaaacaatgccgagaaaaaccgttactaccatgtgccagttggccgttggcagttgcttccggccgcgggcgtctcggactggatccacgtaggcaaacggcgtcgtgtagtggtcgtagcaagtctagaaacttccgcgcgcgcaggcgcaggcacaggcgcagccaaatggttgtgttttaccgcggggggccaggcgcagtcaaatcccccgcgtagacgtagacgtagacgtatattggagtacactccctgagctgtctgcgcgtatcagcgtatatacgatcgagtaaacggcgccacacggcgcgtgcctgcgtacgtgggcggcgggcgggggcggtggcaccagctaacgtcctcttccagcttggcgttggccgacctcgatccctgttcactgttgctaatggctaagagcaagtctaatagtacagcctactaccagctccaattcatctatagccaatctaatagccaattcatacaatagttgtttactatactattagtatatggccccacctgttatacacacagtgtgtcttggagtccgtgctgcagctggctacagatctgtagcctgctgctcttctctctcatcgtttatatcattaaaatatgtttatagccggctaatagcctgctattgtacctgctctaatgcaccaccataaagagcaagtttaatagtatagcccactactggtcatctataaccaatctaatagccaattgatacaatagttgctattaatatatggtcccacatattatacatatattgtgttttggagtccgtgctgcagctagctacagatatgtagcccgctacttttctctctcattgtttatcacattaaaatatatttatagctagttaatagtatgctactgtacctgctctaattacgtacctacttacgcgccatcgactctccactaaaaacaaccgattaacggctggactagggctagtccccatcatttacgctaccagtacgtacttcacatccaccggtattatacgtacgtaccatatgcatgctccattctacgtatatacgtgctgtataatataccctccgtattttaatgtatgacgccgttgactttttaaccaacgtttgaccactcgtcttattcaaaatttttatgcaaataaaaaaatacttatgtcatgtttaaagaacatttgatgataaatcaagtcacaataaaataaattataattacataattttttttaataagacgaaaggtcaaacgtttgttaaaaagtcaacggcgtcatacattaaaatacggagggagtactcaacaaattaagggtgagcatcaccagtagctttcttattctattccctatccttaaatttagaaaattttggttaaaagtcgcatccaacagaatccctagcatgtcttccaataatccagattcccaactctggatatgtcattcccgctcaagggagcgattttttttcccaatcgctctctcgcgcgcgcacagagaaaattaacaaaatgaaggaggaagagaaaaattaattttgtccgttggtacttggtagttaaagggagagcctatttttcattataggaaatcaattttaggctttctcttggagataggttttctcacttcctatattcagttttgaagatccaaaatatatagttttaggaattgattattgggatactcttggtgatgctctactactccctctgtcccaaaatataatacacaaccacttttctctcatgtctcataatataagacgtgcatacatgcatacattaactatcacttcttaatcatttaaatttggtttattttaaatcctttaccatcagacccccccaattggcctcatcttttcgcttatgcttatgcttatcagctaaaatttgaattttcaaccttaaatttggagttgattttgggttttttcatcgaagtttgtttttcagcatttgcttttaaatcgctaagaacacgtatataaaagttttattcacaaatcatttttcgtttgtaaatatgtcgtttcgcttatttcgaaacgatgggctccattgcttgtactccctccgctctctaatataagggattttgacattttgtttacactgttttaccattcatcttatttaaaaaatttaaaattattttttacttactttgttatccaaagtactttaagcacaacttttcgttgtttatatttgcacaaattttttgaataagacgagtggtcaaacagtacaagcaaaatgtctaaatccattatattaggggacgaagggagtatgtatgaatatgattcaataaagaaggtgattaatttttttccttgatctttatgttagggatggttgagtcttatattttgggatgaaatgagtagtactagtgattaatctgcttctagttaaacagatttcttctctctccccttgaaattcatgatccctcgcatgcatatgaggcctgtttaaaacttcttattcgctagattattttagtaaaataataatacatatttttagaaataaatttaataattaataaataatttagaacatatggtctaattaatacgatacataaaggttctttacaaaaatatttttttttagaaacgtgaagcaaataatccatagctatatttataaagcttgctaaaaatgggccctcgttgtcagaacgttcaactactactttaggttgcgtttattccacgccaaaattagaagattgaagaaattagaacgatgtaacggaaaagctgaaagtttatactttaggttgcgtttattccacgccaaaattagaagattgaagaaattggaacgatgtaacgaaaaagttgaaagtttatgtgtataggaaagttcgatgtgataaaaaagttaaaagtttttttaaaaaaagttggaataaacagagccttagtttccgtttaggaacaggacgtccaggcaacttctcatgcacaaattctgtttccctacttctataaaaaaaaaaaaaaacaacccatgcatgagggagttgactgcattcagcaagcctggacaacaaattaaatctatctcaccccaaatgggaacactagcgacgtgctacgtacgcatcatgcgagtcaccgcccaaattgcataaaccatagtttaaatagcactatcacagcacaatttcgttatgcgacatcgctggagacggtagtatgcaaattgactattgcctataacgggcccaagtcaccaaaaaccggtcattccaaagtactagggtgatgttgaatataaagataaagttaggatatgaaaaataaacaagaaaagctgtcaccgcatcaataattaaattttgattattacagatttaaaaaataatttatttagcattatttttaagcaatttctatataaaaagattttatatgaaatatactatttagcagtttttttaatgcctctatttagcagtttaaaaaacggaataacaaaaatcaagataaaatctgtctccttgtgagaaaagaatgaagccttaacgagagcgtataattaaacaggtgaaagaaaatgagaatggaatttcagcatctcacgcagctgtcgcctcgcctcgagtggcagcaaaaacaactggcaaaacgggaaaaacaatgccgagaaaaacgaccacaaaaaagcagcagcagcgtcgacgacgacagcgacctcctcggcgccccgtccatacgtcatcctcgtttcctcccctttgaccatctttctcctctgcccagctttcctcgttccacacctcagtttctcactgccttccgttggccaccctgcaaagccccaaaattacaacttggtgcttggacgttcatctacggtcactacaagaaaaatactctgtatagacatttttctagtactgtagaggcacttatcaaatgcctttacaacaatgtagaggcattttaaaaaatgtccaataagtgtcttatggtgaattgtctctacaaacgaagagacattttataaaatgtctataagatggtagaggcattttttagagactaaattgtaccgcaaacatataaaaccagtcaaaaaagagaataaaatagtttccttgcttttgataagtcttgaactcatgatcttttggttaaatcattttaatcttcgatacactaaccaactcaactccatgtcattacttgtatatttgttcctttaattacttatatttagtcgtttagtacacattatcattctaaaaagtgtctctacatagtttaaaatgtctcaacaaaatgcctttacatattagacgcattttatagtgccgaaagaatgcctctacaagataaaatctaacaaactgatataaaaatgtctctagagtaaaagttttctaggcaatttttaaagtgtctctacactataaaacttctgattgtagaagcaatttacaaaatgcctctacaaaagtgcctctatacgagttttttgttgtagtgggtccactgttttttttttgttatttttagatttgtactaggtagctgtggtagctttgagcactccaatttttgttggatgtagtgcattgcaaaattaattttttgtctgtaattaggagatcctaagaatttcaaagagagtgtatagctttgtgtagcatcaagtttggatagcccttttttttattttggtgtcaacaaaaagacaaaagaaagctatacaaagctactcgcagcccagcacaaaagaattttaagtctgatattttttttaagaatataaaaggttggcttgtttcttgctagttatcacggtcaaaatatgtccacggatttttcgctaccgtttcttagagctggcatgacgacaaaagatataaagtgttcatactcaagcttttgggagtgcttccataatagagttattgtagatgtatttatgattcgatattgtaatttgcatgcatatcttcgaagggtaaatgtttcagattgttaggaacaaatctaacattatttttaaagaaaaaaaatccccaatgatagtacaaaataatataggaagatgaataactaccattaaactactttcaatgatatcctttttcattcaaaagggtgatctgccgtatgctttctacatttaattggctatatttctcatagaagtccatttccaagctaacattaaaatagcgtgtgggtgataaatttctttcttttttaaaaaaagctagcattgaaaatagcgcgtgaggacgaactgagctgccatttctgcatttcatttccaggtagagtacttgtacaatccaaggagcgtttcgtaaattgtttccttagtcagggtgtgaaacgaaaaggccaccactgcctataatactagcctcctccccccacatggacccctcatcctcctcctcctcctcctctcccttttctactccattccattccatctcctccacttccaccctcaggcctcagctcgccatcgccattgttgcaacaccaagtgtttgtggtcggaacgagatcgagcagcagccatccatggtgaggaaggagatgggcggcggcggcggcaggctcgcggcggagtaccagggcctggaggtgaaggtacccacgttcttccggtgccccatctccctcgacgtcatgcgctcgccggtgagcctctgcaccggcgtcacctacgaccgcgcctccatccagcgctggatcgactccggcaacaccacctgccccgccaccatgctcccgctcccctccaccgacctcgtccccaacctcaccctccgccgcctcatcgcgctctgggcctccacggccgcgccgtcgtcgccggcggcgccatcggctgttggccccaccccggctgctgcggcggcggagctcctccgccgggtcgcggcgcccggggtggacccgtgcccggcgctgcgcaagctcgcggcgttcctgtctgacgacgacgtcgacgagttcgacaagaacgcgctcgcgagggccggtggcgcggcggagaccgtggcgtcggtgctcaggaggagggggaagggtgatgatgatgatggcggcgtggaagccgtcgaggcggccgtccgggtgctcgcggtgctcgccacgtcggactgcatcgaggaggagaacaggaggcgcgtcgccgccgcgctcgccgcggggggcgccgcgccgtcggtggcggcgtcgctggcgcgcgtgatgcggagcgggagcgggctcgaggcccgcgtcgacgcggcgaggctggtggagtcgctgctccgggacggcgcgcgcggcgccaccgcgccgggggtgagggcggcggtcgccgagtcggaggagctggtcgcggagctgatccggctcgtcggccccacggacgagaagggcagcctcgacgcgcaggccgtggacgccggcctctcctgcctcgccgccatcgtcgccgcgacgcggcgcgcgcgcgccgagatggtccgtctcggcgccgtcccggccgccgtgcgcgtcctggccacggaccaccacggcgggtcgcacgcccaggcgctgcgcgtgctggaggccgccgtggggtgcgcggaggggcgcgcggcggtgtgcgaggtggcggaggcggcgatcccggcggtggtgtcgaggatgatgaggtgcggcgggatgggcggcgcggaggcggcggtgtcggtgctgtgggcggtgtgccaccggtacagggaccggcgcgcggtggaggcggcggcggcgtcggagggcgggctgacgaagctcctcctgctgatgcagagcgggtgctcgccggcggcgaggcagatggcgtcggagctcctcaagatgttcaaggtgaacgccaagagctgcctcgccggctacgactccaagaccacccacatcatgcctttctaaaacccaaaaaaaaaaagagaaattcaaattctccattaatttgtcagcttcgttcgatagagaggaaaagaatcgagactggagaaagacaaacttgtacatggttagagaaatttttcctagaaagaaacagatcaaatttcttctttgttctttggccaaaattcagtactgccatgatgtgttcaaacaaattcagtgttgcaagggaagggcagaatgactttcatctttgcatcaatcacacgattcacatcgcacaaaccatcgtttgggaaaaaaaaacaccaaaacgattcgattctccattaaaatcggtcaaaacaagagcttataaaaaaaaatactatgcattaggtgcacatccagcatggttctttgctccatcttggagcatgtttcatcaggataaagaaagattatccagctacacacgctatgatactggagtagggagtattgaccgctgaccatgatctgatgaccggatcctgacaggtggaccgaaagattatgagatcacacaaaagtcaacgagagtcattgaaatctccttcaccataatacatgcaggcacaaaagggcattattcatctgactcagcagcatccatcttctctgcatggctatcctaaaaattgcaggatttgtagactagtgcctttttgacctgagaaaagagaaagaaaaccagctgccgagcaccttttcaaagttgaaagtttggtttgaaattgatacgatgtgactttgtgtgtgtatgatatgttgatgtgatagaaaaaattagaagtttggatctaaacacagccataaagagaggattgagagctttatcagttacctatattttctaataactcgaaacattttatcaggaaataaaaattaatttataggtaaaacttatatatttattcgtagcgacttaaaagccaacattaataaaaaattatgttaacaatatcttaaagtcaatatcaaaattaagtttaaaaatttaaattttagcatttgctttggtttattaggctaatcgatggggctctaaaaggaggcggcaaagcgtgtacgttccgatgaatggatggattagatgggatgagtggaaggaagaggaagcaggtcgacgaccacatgcaattttgcggtgcgctcacgccggcaacgcggctcctctgcccactctcacttgtatctcagtacagctaagaagaaacacggtaatggtagtagctgtcttgattcttaagcaatggagtagtatatatatatatactgcttattaaatggagcagctcgtggtacaaaatggtacccttgttaattattaggagtagtagtactctagttagcaaaattctttagatacaagccatgttttggaagacatttgtacgttgtggctaataagtcgattgcgtgttaaccggaacaatgatgaaaaatcaattttgagagtaagagctttttttttttttttggtggcgttgccacaatttggtaggatgagaatttttttttttgtttgaaggtagaggatttcaagtagaagtttagagttttcaaattttggtaaagtgctaatggttgaaaatgttatcagtttattacctcactgacatttgtcattgctatcgacgtgtgatagtcagcagaaccatatctggtagtaatccggtgttcagtgacagggtttaaagctatgattataggagcccacgactggtcgctgacttaatctccgatttatgttctgttgagattagttgtgttggctagattagattatagaacccacctcatacttggcaatggtctgatatttctagccaatccatataaattggtgtagtgctattactcttttggggctcgaacctatataaaaaacgtgagtctcactctctctatattacatctagacgtatatccttgtattatcgcagtaggatcttagctattgacggactatcatttgacaatggcaatgggatttacctatatgatggactagggtgatcttgaccttaagaggtatgaaagttatcggcaaatttcgatcgagaattcactgtttcaaacttgaatttatagaaaaccattcgaaaatcgcaccgaaatccgctttcgtcccacgtcgatacctcaagattgtcacgttatttcgtcaagaaaacgtgatttcaccatgatgcgcaggaaggaaaggaatgtgagggaggaggattaaggttggtagaggaggtgcgtgccggcattgatgcccctgcttgactgcatatgcccctacgcatcgcaaagcaagttggccactgtttactttgcctccgggaatcatcagatctcacctcaaatctttctttatttctgcccggcaaaggcatccttgatgaatcctttgactggactgggattttgcacgccgcgcggcgccatcatttggctgttcgattcaacaaactcaagcgatcgagatcgaagcatatccgttgttacccacgcttgatttggctgcgttcttttgcagcggacaaagagaagaaatccgttgttattcatgtccacgtttatcgaaccgataaataatactccctccgtacaaaaatataagcatttttagcgtaatgacaagtcaaacttttataacttttaccattaaagtaaaaaaaattaatcatgtaaaattgatgttactagatttatcattaaacaatctatcataatatacaactctttttatttaaaacatcttatttttatagatattattggtcaaaataacatctcggataccgtgtcagggtccataaatgcttatattttaggacggatggagtatgttttttttaaaaaaaaatctataagaaaattgttttaaaaagtcatatttatttatttttcatgttcaaaataattaaaggttgtctatctaccaattgaaagaaaacacctctaagaattaatcaggtgaattttacatcgcctgatagctatgagctttgtacacaacctctaaactaaccctacacatcctctcctcccttgttcacttctccctcctagccccaccacgtgcgatacacgactcgagcactcgaccgtgacacctcctcaatgtgctgccgtccagccatgtcggctggctaaaaggcatcaacagcaccggtgagcccccacctcccccccttccctggccagcctccttccccttccctcatcctcttcccttctctcccccgctccgctatcttccctgtctctagtgactccccatcatcggatccatcaccatcagcagccaccttctaagtataagcttgtttttgccctctccatcaacaatggcccactgctctcctgctctcctatatcctcacggctttggcatcgccaccgccaccgccgcttcatcactcgtctatgtccaccatcggtcaccgtctcccgcggtcatccctataagccaagcgatgtacccccttccatctccgccccaaactaggactctaaactcgaatttattaatttgcctatgtcaggaccgttggagctatcggagctagagaagaatgtgtccttagagctgctggagaagaggtcgctgaaacctgaatcacgaagcaaatcccatagtaagaattctgcaagatttttgacccaaaaatatgtcgccaaccaattaaccatccccaataatttatagtcaaatcatgtactaactaatatctcaccttgttttatatatcttctcaatcttcttcttttcccctctctctctctcaaatacacattgcatcggcgaacaaatgttaggtcaccgtagcttctgctcgctcggttgaactgaacaccgatgtctctcgtttttccttgtccagaaaagaaattgtccgtgaccacctgtttcctagtggcatcaccgaagattgacagcgtcaaaccgaacgtgtgctacttctggaagagcgcaacgctccaaggaccaagagacttcctgatgacaagggcattatttcagcaggaggagattattaacctgctggttaattacttcatatgctgattgagaaaaggagagaatgaattaggctgaatctttattagcagggtaaaaggtcaatgtgtgacattgttgtttggctgttaatgcgacttgctgctgacaatgactgtgtttagatccaaactttgaatccaaactttcaacttttttcatcacatcaacctgtcatacacacactatttttcagtcacatcataccaattttaacccaaacacagccaatatatggctaccgacctagaagtacggtgaagacagtagttaaaagagaagggtacgcaagcagagacggaagatgctacagagaggaggaaaatggatggaggaaatgaattaagatgatgaggttgaatcaatcacttgctagccacgcgattgacttttgcattcgatcatcgatcgccggttttctttcttctttccaatttcctttcgtttcactagtcactacattgagatctcacatctttaaattgacacttgattaaaggtccttctagacaaaggttgaaaatattttattagtcacacgagagttatgattagcatataattaatggattgttaattatcaaacaataatcaatttatttattttgttttttatgtacaaaacgtgacatttaacaattaaaaaaaacatgctaactagctaaatcatgtgtgcgactgcgtacttagggtgtagtactgcagtgcagcaactagaatattgctggattagctgtggtgttttgtgatggtgatgatagatggattggtcgaatgtggccggtcttcctcaagaaaggggataggagagtagaggaggccagacagaacggttgatggaggaggcaaggcgatcctgatcgcgcatgtagcgtacgtacgggcttggtacaactccagctccagttctatttcttctggagttagagttcagccacacagtttcagctccacttaaaataggagcggagctgaatagagctctctcacatgacaaaatgaactagaaaagtggagttgggtttaggcagctccacaactccatttcaaaccctaacttctgaagctaaatttagaagttggagctctacaattagaaccataagatcttttttggttaatcatgtcagaaggagattgagggtgatttgttgatggtttatttaatatgtattgatgtggaatttcgttttcttttaggattaaccaaacaagttttgaaggaagacaacgaggtacgttgagctgattttgatcgagctggctgccggtggttgatgcttcttgctccaggctccagccaagccaagccattttgctctgttgacagcgagaattatttattatagttatattttaaaaaaaaaacttaaaaagaaattacgacattttttttctttttctaagcaattttcttccttgttgcggagggattgagatctctttttaaaatcacgttactttggaactcacatgtggtcatccgttgcgtggttgcccatacaattttcaggcctgcgtgaacgaggaggagctaaagcctgctaacgctaacggtttggtcttttaaattgggccagctttttaatgggtgcaaacggactacacgttgctaataagctggaagtgaggtttgccgcacactgtaaatgattcggggaataagtccactctaggtcccctatcaaaaggcctagtttgaatcttatcactcaaccgaaaaacagggtaaaatgcatccatgatcttttaaaaccggtgtaagtgtagtcataagcggtattgagaccggttttaggtgccgtggctattacagtccacaaaaagaaatatacaacaatggggtccatatgttagacaaaaaaacatcactatccctctcttcccctatctctcttttaagctcttcacatgagggctggcgcgtgccgacagtcagctcacatctctccaaacctagcggtggcagtggcacgctctttggcggatcttgccctagtagcggaggcggcggaggccgctacggcgaaagcgacggcgacaatgtcagcagaggggattatggtgggggttaccgcgtctacggcgtttgtggcacaggaggtcatcgggcggtggagctcatgcagctgccaccgaaccacgttcctcaccgccatggtgggggaggtcaaggaggtggctatagcggtgccttccttcatcccctgcaagctattccattgctgtaccaccgaagagagagggagctcgacgcccacactgaggcgaagagtgaggaagcgagaaggccggcagccgcaccggatgttgatagtggtgacgacgacacaatcaggcaaattggaacgatggcgcagtggggatggccgaccatggccattgtttgtcttccccacggcagtaaaaacaatgaggcgctgctcctctattgctcatctttcccacggcgatgaagacaatgagaggagtgctgatggatctagagcagcaggtcggtggagaggagaacaatggtgtcgaagaggatgaagagggacaccctcaactccaaatcgacgtgatggaggcttgccgcaccggcaacccctccggtttcttgaccaccaccatcaccgctgcctccactcccatgatccgtcggtccgcgtcgccgttggggagctggcggcctcctacattgatttgccacgcaccattcagattggggctgtcggcacccgcactgcttcgcccaccgccgctccagtcttcttgcctgctttgctgctccttgctcagagcatgcctgccgccgctccgctctacttgctgcgttgctccctgctcgaagcgtccatgctgctccgcccgccatcgctaccgacggagggagagggacaagggaaaagatgatgtttcactgacatatgggttctacatgattttttttaataaaattttgcttctgtttccacgtctgtgaaaatggcttcaatactatcttgggactacatttgtaccagtttggaaaaatgagggatgcgttatacttgtttttgcggttgagggatatgattcaaactcaacgttaacatgatggacttaaagtgaacttattcgtaatttgagctgatttgttctcggctaaaggtcaatcaagagatgaggcctgaagactctagtttgtggactatgagatctttggcgtctggtgggctaggctggctgatctccccaggctcagcctagccctacggtgagattcatgccgtggagaatctgcctgttgtaaaccaacacgcctattagcgaatcaccggatccgttccctgtccctcccacagcaatagagacgtgagatgatgtagaacacttgcgcccatccctttgccctcaagaacattgcagaagtagacaatgaacacagatatagggtggagctctctcttcattatagatctcatctgaagtacaagccagccatcagccatagatgtcacaccctgcccctgtatatataggggtcttagaaggagatagatcttatctctactccggttcggattggcccacaagaaacttatctctaagagatttgtttcgcaacactcccccttgggctaatccgcgactaactcatgcctcgtcaaaactcctaccaaaacctagtgggaaaaaggctaggagaaagagtacatagttatcgctcatgcattgcacgttgttgcctcgttaaaaaccttatgtgaggaacaacagctccactcactcaaggaaaaagagtacaacactatagactacacggtccatactgtgggtcatgttctagggtgctctccccctgaacctagcaaacatcaaagtcttcttatcccaattctccggaaaagctttcgagaactaacagttgggagagactaggtgatcaatactctagattatcactcaacttaaattgctactcacctcacctcgcctcagtagtctgaggtagcccacttgtatctggtgtcggtcaataaagacaggtcttcctatgataggaccttagaaacaggtctaagtgatcatcatcgagtcaataccctgagcatactctaagacatttcaatgtctcgcaaatgacaatcaacacatagcacatactccccctgatgacaacctttgtcacagaccatgttcccatagcattaaacatctctcagatgtatgcgtacgcaagaatccttcagatcctcaaaccattagtcttaaaagacttgtctcatttcaccgctaaaacgagaatagggaacatagagagtaatgcattccatcactatcatataccacaataccacagtgttgtgcaacgcaatctgtttcatccttcagaaggattatggggataaataagtcacaacggtacgcaccttctcggcgtgactccatcaagaactaggtcttgatcattgcaactttctctgatgatgtcaacaacaattggggatccacaagatcaaccataagccttccaaagacatgctgtaacaatcagagtaactagctagtctaaaaatttaagcactgtgggggataacacacagccaacaacaccaagtatacctcaataggtattagaggacaccaccattccaaccatcaggtggaacagatttcacgagtgtacacactccaatgataatcgcgagatgcacatgtgcctatagaccccgtctgtgatcttatcaggttcctcatttcaatcttaccgggtcataaatgggtcatcatccctccaagggattatacaatatggtgtgttcagacttactaattattttgtatctcagaggaaaattcatcaataaggtctcccccttagagaaaattctgtcaatgagattttctcccaacgggagatggtactcttaccggaatacccattggtacaagatttgcatgccgcaatttcactatggagtctattcaagacctcatggatttcctaaatccgctaactgcatatttaatttcatgccattttgccaatacctttatttagcagaacattcaactaacgtgggagatgtctcatctagggcctacttgaaccatcgcacatcaccacctcattatctcaataatgacccgtaaaaatctgaacaacattcgcgacttttacttagcgattcggttcagcctcaattgcatttccatttgacccgatttgagcatcgcatgctcatgccaaggactttttccggatccgggttctctcacagagaattattagcaagaggcgacatagtgtcgacacatttatccccacttacacatttaactagatcttcgtcatttcccaaaacgatcgatccatggttgttccgtattcctagcaccataatatgcgcgcattgctaggaatgtcatctccatgacgaacatcattgtgaggtatgtcaccttccaaaggtgagttctcctttcggagaattagaggagtctgctcacatccagtgagaactctaatgctctgactgaggcctacggactgtgttagcaggcgtccccgcataacatgatcaaatgccataagtcttatatggacacgatattattcccgggtctatccacatttaccacaattgggagcattactatttttgacaactatctagttgttcctcatatgattttgttggcaaaaattccgtgcaccaagcaaccaggagtatgaactaaacatacaagttcagctcatttagtgcgttcactcaaagaaatctccaggcattccaaaatgggcaattctctccccctaatgccgagatatcttacaatagcatactaccaatccccatatcgtggcataggattaaggaatttcacctcgatcacaaatgttctcccacgaatgtatgctacggtggtgatatatttgggaaatattacacactttaataggagagatttttccattatatgcagtgagcctggacatataccaatacagtggcatgaatactgttttcttccttcttccgaagggttatccccaacctcctagttaggatatacaggtctgcaaaaaccaccattgctaccaaatgtatatgcaaccaacatgcaaatactttagccaaatgcactctccatggattaatgctcacctagtgccactcaaactcacaatcgattccggatcgacgtgcgttagacatcgcatgtcatatgcttaagaaggcaacctatggtggcaaaacgcattctgatgcgctcaacaaggagtatgatagcaaaatgcgcggccactagcctgcgctgccaagaagatttttgtggtgcagagttgttttaaagtccatctcgtttaatgcccaagtttgaccccaattactcataccaaactctagaattgggtcatagttaagcagcatgtattaggtacgatccatgagcgaattatcaaaccacatttgctaatgtcccctggacatagccatcaagagataatcaatacctctgacaatggtaatattcataataaaaccattatattcagacatatccacaaaaatagtggaatgtgtcggtgcaaccgtcgttggcataacgagctcaacgcatgcaacacgacgaacctttgcatcgcttgcacatgtccacaagcgaaaaacgccagtgtgcgacaagcatggtcatcaacccgtggatgatcaaccaacacaactagggagtagtcatcgactacgagagcgcgataaaacgcaatagtgcatagccaacatttgtctgaaatacagttacatcggactgtgtgagtggttgtaactcctcggattatacactaattgttcttctaaactaaagcattttatcaattccagcatgaagataagctttagaatagaacatgaaagaccaagaacgttatttatctgagaaatatcgatctaatgcaaagttccaaactaagcaaaagataaactgcttggcaatagtatagcggccaatgtcctcctaggacatgctcaaaactagcaatacaactcccgttgtcagaacaacttattagacagacaccaccaaccatcgacatcaaccaaaggtggtcattagcgctagatccacgcgaggacaagactgggtcaacacccaagtttagctgttgacgctatagtggagtgggaatcacgcctattcacagcatctaccctcgggcttattccgctagatttgcctccaattttccggtgtcctcgcaagacaataggttccaaataatattgagaagatatgtgcacaccaggggcaaccatatgaacagtgtcgttccaccacatggaaaacactttacatctttcaccggaccgagtgaaaaatatctcaaattattgaacctcgcaactccacgttgccagaaattgaggtataatcatttatctccaaatcagaaaagcatgctctcaaccattgggaaagcaaaatgtcgaccgtagtccgaccatactctgattgagatgttaagccactagaggaaaggcacaatgaatcccaaacacattgtctaattccacatatttcaacgactcaaaatcccattcttgagtgtgatcatagggatagagtgatctacattaatgcccaaagccagacaatagtcattgagggcctttacgtgaaatcacccacactatcatccgaatcgtttcatgcggttcttagagaacgcaacacgcaaacggacgatttgcacagtgaattcggcaaaagcatggatctcgtacaacaagtatacgtgactccatcttgtagacacatcgatatcaccatttatgtatggaggagtgtatcagtaaagagtggtcttatccatagccatggatatttaatttcccagaatttccatgcattaggtgattttctattatttacttggtcttatttggcattatattcccaatatttatgccacacagaaaaccatcacacataaatgcaggaaaataaacccatcataatgcttccaatgggggattctacactatgtgaacacaatttatggaagcatcataacctagagaaccatctctagattatttagttggaattgcatcaattttaaaagcaaagcaatgcttaaaaaacaccattacatggttatttacgagtccgaagacccacatgcaaaaccaaactatacagggcctaagcaacaagacatttaaacagtgaactatagcataaaaacccaacactccgggggcttaaacgcaagttgtcaataaactgaaattaatcaggccgaattaccgttcaggccacgatcttatttgggctagcaagcacagtgtagcccaaaatgcctaatgggccgaatttccgaaactctaggcccatgaggatttccaggtttattatttttattaatttgtttgggctgtctcgttactattgggctttattcggtatggcgaaggcagaccgacccagccggttcgcctaagtgaccgagagagggaaggggggaattagggtttcccctttcccattcattgtccgcaacggcgtccacctcctggcacacaggcccctcgggcacggcggcggcgttggaggccgtcgactgtcgactttgaagggatttaggccggcgcacggcgaggaggtcatcgacgacccatccactaccccgattggcaggacggcggcaacgacatcactcccgtgtggcaatttggtgcggtggcggctcggtggcacacgacggagtttcgcgtcgacccgcgcatcctcatgacggcggcgaggcgaattcaacgacggcaactgagacctcaacaacggcaaccaaattgcatccggccatatcgtctcggtggaggttaatccggtagcaggcaggcgacgacccatcatcctcccaccacggctcgacggcagcgttgatgggaggtcaacgatggcggcacatcgcttcagcattaactccagcggcaacaacgacatgggtttagggctttctccgaaacggcggtttcctgcggcggcatcgacacaaggtcgacggcatacccaacagcgacagcgaacgacggtttacacgtctccaagtctagcaaaacggactgagattatgtcaccgtgttcccggtgtggcatcatcagagaaagagagaaacagagagatgcgagggaggcgggcgagacggccgatttggcctagccgaattaggtacgtctccagtctagggtttcccatcaattttagtgatttctctcacacggttttctctagttttcatcaaataaaatagatgcatatatagatcaaaagcaggaaattaatctaccgctagatcaagagcaggatcaaatctactgcaagcaaagcatccataatatgataaaaacgagaaaatataatcaatcataaaaacatatatatagaccgcataccttaatagacacatgcccggatgcatctatatattagtaaattagtttagaaactaatcttactaattacctcagtttacgtgctcgccaaaaaaatatgcacgtacacctgcatcgcaaggctcctactgggcgtagtgcgcgcgtaccacatacgcggccagccatctggcgagtccaagcgcgcagtcctgggcacatgtgtgcgcgtggtcagtacgaccgcacgcgtcgtagctccggccggacatgtaaacaggcaaaaaaaaaatcaatctttaattagcatcaacaaattaacttcaactaagtagatgtgagatgcatgtcgatcgatctgcttgtccaacgtgcatgcaaaccaattcattcatgcatgcgaggcgctgggcttttgcggctggctcgccgtttggtccttgtgaccggcgtgcatacacacacaaccgatcgatggcatgaaccaatgtcagacggtcgaactcccaggccggcggtgcgcacgcctccgaggcgtgcccgcaggccgcagctgcatgcacgtacgtggagagcccgcaaatcgcgtcgtatgcccgccgactgcgggcgtggtgcagcggaccacatcgcttcacgtactcgctgtgttggcgattggcctgggcggcgcctcctctcgtgcacgtggcgtggaggagatcggccggccgcgcagctgccgcacgagcacacaaggcggcgtggctacgagtttacgaccgatcagatcgacaacgtcgatggtactgtagacaaaagcaataccatagcagatcaatctgtaattagaaattaatctaacaacaacaacaacagattggaacgacaaaccggtgaacggagagctgctgataacatgttgtaaaccaacgcgcctattagcggatcaccggatccgttccctgtccctcccacagcagtagaggcgtgagatgatgtagaacacccacgcccatccctttgcactcaagaacattgcagaagtagacaataaacatagatatagggtggagctatctcttcattatagatctcatctgaagtacaagccagccatcagctatagatgtcacaccctgcccctgtatatataggggtcttaggaggagatagatcttatctctactccggttcggattggcccacaagaaacttatctccaagagatttgtttcacaacactgcctactcgatcctggactcctcgtgccctgcaccctcacggtctcaccggaatcgctaatgcacgcgcgtgccggcggtgcgcgtttcggcccaaagggcccagcgccgacgcgcgctcgcgtcatcccacctttttttttcttttatttaccgattttttcgttttttttcacacttttttctgattatttttttaatcttttagcatgtcttgagtttgaaagtttttaaattttgagttgaaaatttttgaatctggacttgaatgttttcaaatcttgatttgaaaattttcaatttttttcaaatcttgatttgaaagttttcgaatctcgatctgaaagttttcgaatctcaaattgaaagttttcaaatttttcaaatctggacttgaaagtttgtccagattgagatttgaaaactttcaactcagatttaaaaactttcaactcagatttgaaaactttcaatttgagatttgaaaactttcaagtacagatttgaaatttttaagttaagatttgaaaaaatatgaaaactttcgactcagatttaaaaactttcgactcgagatttgaaaactttcgagtccaattcaaaaactttcgactcaagatttgaaaactttcaactcagactcgaaaattttcaactcagattccaaaactttcaactcgagatttgaatactttcaaatcagatttaaaaatttttcaatttaagatttaaaaactttcagctcaaaacattttttttaaaaaataagtgtgctaaagattaaaaaaagtaatcagaaaaaaagaaaaaaatatcgcaaaagaaaaaggaaaaacaaatcgtgagaaaaggaaaaaatggctgatggtttgatgggcttgatgggccggaagcagttggcgcgcgtgccgccggcgcacgcgcgccaacagcaacccccggtctcacatattccctacgtcttaaatataagatattttgaatagttgagacatatctttgatactataaatctataaatctgtactgaaaattgaaaattgagtagtactatatgtatcatatccaattaaaatctcttatattttaaaaataaagaaaatacaactctactctacttgtactactaattttattattactactttagtacgagtgtacgagttccatgcctaccttgccaaggaaagacaaaccaaactgtacgtccatccatgtgtacgagttccatgcctaccttgccaaggaaagacaaaccaaactgtacttccatccatgtgactgattttgctcatgcctactttcatggagtactgtattgctcccttgatttttatattataagtcgttttaattttctaactagttaaacctttttagcttaattaaatttatagagaaacatagtactatttttaacgctaaatatatcattaaaatatatttaattttagatttaatgaaattaatgtagtgttgtcaatgttgtcattttttctataaacttagccaaacttaaaaaaattaacaaatagaacgatttataatatgaaatggagggagtaacaaaatggcatactttactatggttaaaagaaaaatatatatatataataatagcataagcaaaatatactactccctccgtattttaatgtataacgccgttgactttttgacaaatgtttgacatttcgtcttatttaaaaaattatgtaattataatttattttattgtgatttgatttatcatcaaatgttctttaagcatgatataagtatttttatatttgcataaaaattttgaataagacgagtggtcaaacgtttattaaaaagtcaacggtgtcatacattaaaatacggagggagtatttcttatcaaatatcatggtattacttgtttactttatttgattcaaaataaatattaaattattgtacagtatcgataaatatatgtaaacagtataaaagtggtggtaacaaaaccagccaccatcaccactagtggctttttatagtagtatatagacaacttcctctgttcaaaagtttgttctaaaatataataacttactccctccatattttaatgtataacgttgttgacttttttttcaacgtttaaccattcgtcttattaaaaaaatttatgtaattatcatttattttaatgtgacttgattcatcatcaaatgttctttaagtatgacataaatatttttatatttacacaaaaattttgaaaaaaacaatggtcaaacgttgatcgaaaagtcaacggcgtcatacattaaaatacggaggtagtatctatctatgttctctttttaatcaatcacaattttttctctgtttaatttctccatatgcttcatcatctcaaccactcataatatttttcaatataattctacatgttttcttcatatccatctctaatcatattctttatattttgggacggtatctgtacgtccttggctgcctacatttaacgtatgtacgttccaagctattaattcccttttaaatacgaatgtttatacgatcagtacccccttccacctcgccctgttctttatactccgtattttgggacggtagctgcccgtacagatgcatcagccgtatccacccgatcgtacacaggttttttatttttttttcgaataagatacacatgtttttattagttacatacaacttatatatataattgtactgtaattatagtacatttatagtgtaattgtagtataattatatcatatttttatttaaaagttaaaaaaaacttacaataaatatacgacgtaccataccgtccctaacttttagaatgacatttaaacatttttcttgttaaaaagtactactttgtaagtataatttatttggctgtgaaagttaaattgataatcaccgtgatttgttgagatgataacgtatgtgaagtaataaattagagatggttatagttggtttggagaagtgaagttgttatattttgaaatagattataaatgttaaaagttgatatattttatgatgagaaagtaatctagtattatcctttcccagaatataagaatttttaaaggtgaatacagttattgagaaagtaagtggaattaaatatgtgaagattgtaattggataagaatttttaaaggtgaacacagttattgagaaagtaggtgaaattaaatatgtaaaaattgaatagtggagggtgttgtaattagttgagaatagaatgttagtgtagaaattgttatattttttgatcaattccaaatgctaaaattattatattttggaatggagtagttgtaatcgaacaatgtatatacatgactcaatatcaagggcagctatacaaaacatctttttagttttcagcctgaatcgtattcgtacgcttagagtttaagtaaatcgtctgctgaagccgtacttttcattataatcctatactccctccgcttacacaaaagttcggtacttcattacacgctaatattgttatatactcatttcgtcttaaaatatataataaaatatccattcaaaatcttttactgtatccatccctaaatatttgacgccgttgacttttctaaacatatttgactattcgtctaatttaaaaatttttatgaaatatgtaaaactatatgtatacataaaagtatatttaataataaatcaaataatagaaaacaaattaataattatttaaatttttaaataagacgaacggttaaatatgtttaaaaaaatcaacgacatcgtgtcagagacgaggagtatattttaaaacgcagaggtaatcgatactttaggacggagagatagtagattgagggcacgtatatacacatcctagctagcgtgccatttattaagatgtaggtacataagtaggtacagtaagtatatagtgccgtgaattagagggcaacataatttcagttgctaatgctaaggcctctcacagtgcaagctatggggctcgtacccctagttcaaaaaattggtccaaatacattcaccccacagtgcaaacacccatatatgtgtggcttaattggatgaagttactgtggggaaacagggcccacagtgggcggaaccccaagcgcatggacacgggtctgcggaacgaatttattcctcaactaccctcgagcggtccgcgtttcttcctcctcctcttcttctgccgctcctatcctcccctcctctcgattcattcgcgtttcttcctcctcctcctcttctgccgctcctaatcctcccctccaccgccgagcctcctctccaccgactccatccgctggaagcgcgcgaccgtgatgggaggaccgctctctaccctaagcacgtggacacggcgagcatggcagcaaccgccgctgccgcgaggaggaggagggtgcgcggcagccgccgccgccgaccgctcggcgtcgacctggccaaggcagcggccgggaggagggcgcgctcgtcctcagcgttcttggcagcggctcaagaaagggcggcggggtcgatggcgccgcctcgcctcgccgtcggccgctcgcgtggcggtggagctcggcatcgacctggccaaggcggtggtcgggaggagggcatgctcgtcctcggtgttcttggtggcgggtcaagaaagggcgcgcggtcgacagcgttcttggcggcgtttttgtgttttctgcttggtttcttcgccgcactccagctcctccaccgccggctgggaaagagaaaggattttgtgctttcttgttttatcatctatgttctctttctcagattttaatgaagaataattgtgattcaatctgtttctattcttgattattctttcgagatggatgttttttcaatctgaaattgctagcatctctgatgtcgtggggattttggagggtgatttggggatttacccccccacaggctcgcgagggcacgaggcagcgaagaaacgctgcccacagcgcgcgtgccttgcttttccccttccactcgcgccctcgccgcaacgaagtttcgcgtcgctcaacttgggggcgagaaacctatctaagacgcggtcgcccgctccacgtcgacgcgaatcctccgtggcactactgatgaacgctccagctaggagcacttgagaggcctaagaaacaaaggcaaaaaaaaatcatgatgggccattttgttttttgatgtcatgccaaaactggtaaccaacgttttgagaatgtagagttaaagttgattgtttgatttgacgttaattaaaagtattcatgtccatgggagagaaacacatgggcaacatatataccaaaatcttcgcaggatgcttcctttatttgctatgttgttaaaatctaggcagcttaaaattggttggtactaagtaaaattcgaaaatattctggaatagcatccgcatatatgcgcgcacacatgcctaactgcgtattccctatgtcccaaaatattcggtcacagatgcttagctgtttactatactgttatatactctccctttttctctcctaaaatgtgaaagcacatgatttttttactggtcactaggggcgaattaatgcccacctgaatatattacttccaacgatcttacacagggcagattcgtctgcgcaagcacagaagcgctggaggataataaaaaaaatacacggagatatacagagaagagaatacaaatgcatcacaacatccctactaagtacacacacaaatgcatagatataagcggagaagctttgacgtttgccacctgcaagaacacccaaccaaattccaaatcaaactaatgctagaaccctaattcgacatcatccaattcgcatgcagacttgaaacaccaggaatcgaaggtgccagagggcatcactgccacgcgcatgccggctcggttctctggcagtcgaaagactgtggttatccaagaccatccacatcaagccgtcagaaatacgacttagtcatgtcgctgcttgaatcaatgcccactaacgacaattggggaaagaagccccaaaggaggctaggccactgaaggatggggtcataggccaccctcaagaagtcgtcttcaatcgggctttaacaaattgctagccagtttaacgcccttcgagggaaggaagccccaaaggaggaagggccgctgaacattgcagttagggacacccaagcggagagggtgaaggcgatccgggggctgaacaaaagagaaatgaaacagatggggatcttactggtggatggaacatcaatatgagagaagaacctagatcgggagcatcacaaccgctggagaagcatgtgtgccaacgaaaagacagacccaagtaaacgaatgagaagcatgctagaattgaggagatttagaggaggcaacaagcaccagcgaactcctagacatgcaattttgggctgagctggtcgtggcaaggctcaaaatgcttccaaccgccgggtagacaagaagaaaagggaattgagcagacattggcaaagacggcagcgttgtcactaaggcgaccacatcggcagcacacacccaacgactccacagtggagcagcccgagttcatccactgccgccctacacacagcccctcggtcgctgctgatccaaccaaaacggggaaggtgaatctggccaccggcgacacgcggagtcgcaacccaccgcacgacattgcaggtagcaagccgtccggcccatccccaccgcacaacctcgccagaaggcggaagcagcaagccgtcggcaagctccaactccgacgggaccgaaggggaggaggagcgtggtaggaggcggatcccccacccaccaccacggccggctgccgtcgccggaggctgcaacagggctgggagacaagacaccgagtagaagagttttggatgtggaaaaggaaaagagagaaaggaagaaggcgacggtggaaggaggtcgtggtgtttgggtggggggagggggggcgccggcggcggcaccgccccaacgggcgtagcgtcgccggtggcgacgaggcggtgtacgcgtgggaacggctggccttggtgacggtcgcctcgcctcccgggttgccctggagagagcgacacgggagatttggtttccgtcttcggttcggccctgtcaagcacatgattttaaaaagtcaacaatttgtaataattaagctaaataagtgtatgtagttcagcgttatgtatcatattaggagattattccatatgatgttaatatttttgtaatacattataacaagttaaccatcaaagtgtaatattaaagataaccaagaaaaaacttggctatcaaataattagaaaaaaatatgagtctgttgagaattaaacacatattctttagactaaaaccatggaccctttaaatacagtttaaatgtaatatactctctccattacaaaatataagaatctagaataggatgagtcattttttagcctatcccagatttatagtacgtgcggtcgtaggttattatattttggaaatgcacctcttattgtttgaaatggaggatacgatttttttttccttgtgatatgttgtgctagcaggccagagtatgtaaaacaacagaaaagcacgtggaccaaaatctcgagtgaaaacacattgatattttgattctcggacgttatcgtgcaccagtgatctgacgtcgacgagagtgaggtggcaggtaggtgaattttcattaattttgaaccttttgattttctttttaaaaaatatcttcacatttagaactaatttttggagagtttatttttaaaattaaaaggttaaaaaaattctccctcatttgtggcataatgtaagagattttacctatgtagtttgacccataatatacgagtttgagattttgtgttcccaacacaacatattagttttcatctattcttgtattattataatttaataaaatttgctatatactccctctgtcccataatataagggattttgagtttttgcttgtactgtttgatcactcgtcttattcaaaatatttatgcaaatataaaaaacgaaaagttgtgcttaaagtactttggataataaagtaagtcaaaaaaataataattccaaatttttttaataaaacgagtggtcaaacagtgcaaacaaaaactcaaaatcccttatattatgggacggagggagcagcactcaaagttcacgatcttcgttgcaagacacctaaataacatgtatttactgtagaataccatgaaagcatggtaattaattgttggatgcctgaatgcattattttattatatccggtgcaatagagagataaacagtacgaaaagtacatatttgcccttgtgtccatcggcttgtaagatggctcggtctcattcgaaccaggctcagtccattcccacttcctcgatgcagtcattctcactggtgtagttgttagcgaactaaacctgatcggtttataaagaaagatacactatgggcaaacttgtctttcttgaaagattctctccatttggaccggatacaataaagcaatacgctcagtgtctaacagctaattaccatattttcgtgattcctataacaaatacaagctatttgggtattatacaataaaaatcataaactttgagcgttctgaagcaaattttacctattttattcacatatcaacttctttgtattattttatttcccatttataccctcttacctattttcttttgaactattaaatgttgttactttcttaatatacagaaaatgacataatcttttgtattatactccattcattctaaattgtaaggcatatagtttttacacggcctttactaatatactttgatcactactttattttatagtatgttattaaacaactaaaaaaattaatatcacataaaagtattttaaaatacaaatataatgatataatatacgtaatacttaacaaaactatattgctagtgtaatatttgttaaaatttatccagtttgatttagcattttagaacggatgaagtaccgcgaacggatggagcattcccccatccaaaaaatactcaacttatgtggtttgaattttgtctcacaggaaacaactttcaccatcttacctactgtctgcacattaaataagaagttttatctcttaaataccctttacctatctatcactattactattttatttaataataagggggtattttagtcatttttactcactattaaatttacattggaatattaggaattttttttaaaaaacggagggagtaggtaggtagaagagcagtgccccaccatagaggaagacagggaaagacagacatgaggaggcagccgttggcgcgcgtgaacgggcaacggcaaaagcaaaccccacacgcttggcgccacgtcacgtggacgaggcgcgtccgtggcgtgaccagaggtgggcccagaagattcccacgctggctgcgtggtcgtggtggcggcctcgcctcccacgggctcggccccaccaccggattcaggaatctcgatattttccccttttccatggcccgcacaccccgccgggcccacctgtcagacatgtgggccgaagagatactactgtagtagtttactccgctacagcgcgctactgacttgtcgcgacaaaacaaaacaaaaaaaagacaccacagtattgcaaattgcaagcgaagccgtagagcagggcgctactgcctactggtactgtgcacaaatcctgcttaatgtaacaattaaataaattgctgcttactaagcgtaactttgctgctaccagtagtagatgcgagattatcattgatttgttaaaacaagatctaatcatggttacaccagatcctctcacgtgttagagcaagtttaatagtgtaaataactactagctctaaattatttatagtcaatttaatagataattcaaacaatagttacatataaacatataatacatggtcctacctatcatacacatattttatcttggagtctgtgctgtagctggctacagatctgtagctcactgcttctctctccctgatatgtttatagttggttaatagtatgctattgtacctgtacttagcgtgattatcaatcgtggtcgaccacaaatccaactgtccatttttttcattaaaaaaaaatcaccaaatccggatcttagcgataagccccacacgtacgcgccatgcatgtcagggcaagcaaaacgagagagcccctctctttctctgtaaaaaaaaacccaaaaaaatgaaaaagaaaaaaagcaggccacgtggcacctgtcgggctcagaccgactcgcaccgatgcaccgaccctcctccgtgacaaacgcccaccgacacggcgggccggccttcacctgggccccacacgtcagcgtcgttgtgtagaaggtgaaagcctcgtgcgatccgagcccgagccgaggcggctacagtgtgacgacgcgattttatcgcggagctcctataaataggcccccgcgaaaccctcgtaacccctcttctactatctctctctctcctccggccgcggctgctcccccccccccctttcgtcccccaaaatctccgcgcctccgagaagattccaccggcggcggacgacgacgacgaagaggatggtggggagcgtcgggaacggcctggtcgacctgggtggcgcagccgtggccgtgaacggcgtcgggaaggggatgcgccccgaggcggtggcggtggcgatggaggtggagtcgccgccgaggcctgcggaggaggagggggaggggtcgccgacgaggagggagatcgtgctggggaggaacgtgcacacggcgtcgttcgcggtgaaggagcccgacgcggacgacgaggagaccggggagcgggaggccgccatggccagcgtcctcgcgctctaccgccgcaacctcgtcgagcgcaccaagcaccaccttggtatgtacgccccgcccccctccctcccctgctactacccgacctccttctccctcccccccgatctggttcgcggcggccccgatctgggtgacgtgtgcgtgtgggcgcggcgatttgggggcggattggcgctgccctttgctgttgctgtccagatcgtgacattcaggttgtcgtcttgtgatgttacattttttttttctaaaagaaattatgaagtaaatgacgccttcacaaaattcggctctgctctgcaaatgcctcgtcgtgtactcgtgaaccgaacaggggaaccttcaatcaggtggtaatcgcgcgattctttcgtgcgtaatcgaattggacatcatcggcatgcttcatttttgttgcttaatttgattgccacctatacttataaggaatggttaaaagttcactcgcgcaacgtgtaagattacacaagcgctatgtgctcaatttccacaacattcgtcgtggaatcgaattttatgattgggatgaggttgcatacgcgagcactgacagacaacacactgtagcagtaagcacgcgctgtatgcaattgagcatcacatgtttttgtttacagggataagaaggtggcattttttatcagtagcttgctcttgacccttttttaatgaaagcaaattgcaattggtttgccagtgtcaacttaggcatgtgccaatatttattgactgtttatttattcagaggtttttgcatatgtaattaggtatgtccatgttggattagtaactacaaatttaatgtgcatgccaattgatgaaactcttacaatgctgcacatgaaccccttttacaaaatttttcctcgaacttataatgaacattttgtaagaagttcaatgttcagcaatgaaaaactggaaattcttcaattcaataagtatgtttggtcttgcaaagcttcgggaccatacacatcatatataattgtataatgtcattcaacatcataaatgaaagccactctgctagtcaagctctttctctaaaatgagcttaacctggctgcctcctctttggaacaaggggcgattccggttccgtgggtgcttcaaacaattttgtgttctctatattaccatatctctagtcaataattttctgaggaattacagaactcaatcacttgctgctagctgcaactcatgttttcggaataaaaacaatactgtgtaatgtgaacaattcatcaattagaaaagggtagcatagacataaacatggaatccagtgggataaattgacccattcaaatatcacataatccttcttcctttggaagctaatctcacatgtccatttgttctgatgaaggttacccgtataacctggacttcgactatggtgcacttggccagctgcaacacttctccatcaacaaccttggtgatcccttcatcgagagcaactatggtgtacattccaggcagtttgaggtgggagtattggattggtttgctcgcatctgggagttggaaaagaatgagtactgggggtacattacaaactgtggcacagaaggaaacctgcatggtattcttgttgggttagtagtcgaagagaccctattctattgactgcaaagtgcattttttcctgtcaaaatgtcatttctgtaaaatctgtactgaatctttctcaacaaattgtttttcaggagagaggtattccctgatggaatcctgtatgcttcccgtgagtctcactattcagtattcaaggcagcaaggatgtataggatggattgtgttaaggtggacacccttatttctggggaaatagattgtgaagattttcagagaaagttattgctaaacagagacaaacctgccattattaatgttaacattggtgagcttggtctcattcctccatgtcccagcttagtgcttttgtagcacatatggactgttttaaaacgaatttaacatgcaggaacaactgttaagggggctgtcgatgatcttgacttggttattaaaacacttgaagaaggtggctttaaagatcggttttatatccattgtgacggtgctctttttggactgatgataccatttgtcaagaaggtaatttccatttcttcccgctgagtccctcctgtgccttatctgttgcacagctatccttaatggtttcaaatagttcattcccctgatgtggtatatatgtaaatttgttcactaggcacctaaggtatcatttaagaagcctatcgggagtgtgagcgtttccgggcacaagtttgtaggatgtcccatgccatgtggtgtccagataacaagactggagcacataaatcgtctttctagcaatgttgaatatctggcatcaagagatgcgacgatcatgggaagtaggaacggccatgctccgatcttcctctggtacaccctgaacaggaaaggctacaggggcttccagaaggaggtccagaagtgcctgaggaacgctcactacctgaaggaccgcctcaaggaagctggaatcggcgccatgctcaacgagctgagcagcaccgtggtgttcgaaaggcccaaggacgaggagttcgtccggaggtggcagctcgcctgcgagggcaacatcgctcatgtcgtggtgatgcccagtgtgaccatcgacaagctggactacttcctgaacgagctgacggagaagcgggcgacctggtaccaggacggatcatgccagcctccctgcctcgccaaagacgtaggcgaggagaactgcctctgcagcatccacaagaagtgaagaggagcttatatattataacaaggagccatgttgcagtgtagctttgtgttgttgtcgtggcctgaagttagtactcctaatgcgttgtgttgtaccccgatgccttctgtatgtaataatgcgttatgcagtcagtgcagcttataatgttgttatcgtcaggatattacagttaagttaaaattgatgggatgaaaattgcatcatctttacctcttctgttctctacctgatgtgatggttccatttgctatattcttcgatgcttctgcaaagactgtaaaatctgtagaacttcagatgctgctggtgctttgctggctttgctgaaacttagggtgtgtttagtattttgggtgtaaagtttttgaagtatacggacacacatttgaagtattaaacatagactaataacaaaataaattacagattcctcgtatgaactacgagataaatttattaagtctaattaatccatcattagtaaatgtttattgtagcatcacattgtcaaattatggcgtaattagactcaaaagattcgtctcgtaatttacatgcaaactgtgtaattgttttttttctatatttaatgtttcatacatatgtccaaatatttaatgtgatgtttttgacttaaaattgtttgagatctaaacaaggccttagtgatagaagggaaacagattgtgactgacgctacacctgcctgccacatcttagccgtagttcctttaattaaagtggaaggttgcaagcaagacatgattactttactttgtattaagtggccagatcagtttttttttaacaaaaaaaactaagtacgtctaactgtggaagttaacttttgcatctttttttcaagaagaaactttttactgctcctgatggtaacttggtagtagtaactttgacctcttacagtcataccttcattttccaggctcccagcagatttcgctgtctagagtcaagcgagttgaaaagtttaattaggcctaatgtggaaagaaagtgggttactgctaatcctcaatcttctaggccgtagttggcacaacgtgctgtatccacattgagatcctgacctgccaacaagtagcgaaaaagagcaatctttcaacaagtatcagataagactggggaggctttgcaagcactaatatattacttcatcgttatcctggactactcgatcttgaaagctcaacaaaagcagatgattttctggatatgcttcactgattggattagctttgcatgttaatattagttgtttattcagagggatggcttgagatttaggagcaagattagccctttttttcggagacaattgtcatatgagaccccaacgtgtagatttttaattgaagtctactaatattaggattgtggccttttttacagcaattattataaaatatatactagttgctaacaatcagacattattttgcagtattgaaatgccagataaaaaaaaagaagaaattctaatggcatctatcactttcattatttggttgctctgttgccttctgatctagtaacactcatgattagtgacagtcgttattagtttcctgcacgtaatgtggctatatccattcgtttttagctgaaattctgagcttgtggggccagctacagccaccatcaaactgctgagtgcgtctccatttatcctccatttgctctcctcctcgttgttggccaagtcacaagtattggaaggataatcttttttaaagtgtgcatgtcaacttaaatttgctgaacaagcaatgcatgaatgaagtagctgatacaatgcggtgggtaaaggattagatatgaacaacattggatcttacaataatatatactttctccatttcaaattatttattgttctatatttatcttacgttaaacattttaatctttaaccatcaatttctaaactcatacagtttaatattataaaatttatattttagattcactatgagaaataattttataatatacagttcatatggtattaaactacacagatttataagaattaatagttaaagatggacatgttcgactcagtataacatagaacgataagtaatttaaaaccaaggaagtaattaagatagtttagcccgatcatccattccaatctgaatattttagttttgtacaatctttgcgaaaagcagacagataaaatctggatatcaagatgtgatagatggatctggatttttcacattttgatccttttgaaaaacttatttcgcaaatagacccctgaaaaaacttatcctagaaatggtcctttttggggcgccagagtggctggcgccgtcatctggcgccgtcctcctgccaccgtggcgtacgcgaaccgacgtggcaggaggagggcgccagccatgctggcgccgccccagggaggagggcgccagcatggctggcgccgctgcctccattcctgtttctctgtatggagttgcaatgtgttatttttattttattttttcggatgttttttcacactcaggatcatgatacaaccaaccacaaaaaaaatttaaactcgaactaccacttagctaagtctgaaaatatctagtataccacttagtctactttgcaccttcactaaaattagaccataactcctttagtaaaaccctttgatcagcatgttaaacataatgcactctaccactatatgaaattacttaatctaattcaaaatataaccacatgaaatgacatatataagttaaacagtacatagagatgcaattttttttttattttatttttttgatatttttttcacacttaggagaacataggaaccaaccgtataaaaaataaactcaaacggataaaatatgtgacatgtagaattttccaaaactctaccgaaacggacaaaatatgccatctattaaaataggcgtaactttctcatacggactcggaatcaggcaaataatatatgcacggacatctacagaaaaatttacatccgattctccccagcttttccgggttcggcgatattaaaacctccaaattccgcttgcaagattgtgttttcgaggagagaagtttttcggtggagctttggaaaattccacatgccacatatttcgtccgtttgagtttattttttacgtggttggttcctgtgagttcctatgtgtgaaaaaaatatcaaaaaaataaaataaaaataaaaaagttgcacatctctctcctctgcactagttcggagagaggagaggagaggaaaaattctacatgtcacatattacgtccatttgagttcaatttttctatggttggttcttgtgtgtccctaagcgtgaaaaaaatatcaaacaaataaaacaaaaataaaaaatttcgggggggggggggggggcgccagccactctggcgcactccccctagccacctcaatatcgccccgtcacgttggcggtgggacggcgccaaagaggctggcgccgtcgttcaaggacggcgccagccactctggcgccctaaaaaggaccatttttgggataagtttttctagagatctacttgcgaaataagttttttaaaaggaccaaaatgtgaaaaatctaggatgtgattcgaagtcacttacaaaggtcaccattgctttagttttacaaaaactttttatcgaaagtaatcgcatttggagatagaagagttggtggtgcacaaacagtgatatgcaaatttatgaatcggtgaggttgtattttaagtatgatcttcctcagttgcttctaaaaggcattcatgttacagtaatcccagtatcaacttcttccctcttcagatgcaatacaaggcatttcatgctgttgaacttgtttagcattgtcttataatttcgtggggctctctcagatcctggttttcctcctactattcggataggtatttgcaagctgtacctgattaacctgtagttctgaaacatttcagtccccccctataactttcagaggttacatatccccacaaataaacaaaaagagcacacaaaataaatgcagaggttacaagggctatactagagcataataaagcagatagttagataggttttagggacaacttggaaagatgatgacctaatgacttacacgtagatatcaagcagcatcatctcagacagaacagctgaacagggtcttagtgcaatgtgcttgtggcaaacattccttaagccacagccaacagatgctagaatatcccttcaattacttctcctttatagatcttctggactagtccattcattctcagtagttcttcttagctattgcctaattgacaagtaaaagtactttgtcactggataaccagatagccattgaccagtaaaagtactttgtcattggctaactagtaaccacaagttaatttgacctatgctttgtaagtaggattgattgctgttgatggcctgggcaaaggcaaggtgacacatcaggagttgtcagctctgatggaaccaggtgctctcagagtggaggcttaaacatttgcaaattgcaaatattatgatccatgattggtaagtagtggctttgttatcttcaccattatgcatactgcacaaatgtgacccgttgatcattattttactgcctccatgattgcccatgaagatatgatttaataagtatcaattactgaaacttttactccccaaaagctaggtgcttcactgattcactcatctggaccacagttgtttttccttcactgcagggacaagaatgtttcatgtaattatcttacacaagaaagctttacattggcagcataacattacatttttagccttcagggcttcacaattaaggcttttctgtgatcaaggctttcataattcaggttcagtgcatggacaaataggaattatagtgctgtccaatcttgaagactcaaagaccatgtctatctgctctgtttcctggaccagactgacttggtttgaccccccaattccacttggccaagcaaaggtcaaagatacatcctcccccacattgccaaaacagcttttattttatctctctgcaaaaagagatgcaactacacaaataattcagtgttctctccttttctaatcctctccttgttgcatgtgtgctatgcttcattacactctctactccctccgtacccgtaaaggaagtcgtttaggacaatgtttaagtcaaaccttaggaatataaatcatgaataactctcaaattgttgagtttgaaaatgtaaaaagttatataaatagatttgtcttgaaaaatactttcataaaagtatacatatatcacttttcaataaatatttttatagaaacaaaaagtcaaagttgtgttttggagaccgtatcgctgttcaaaatgacttcctttacgagtacggagggagtactttacaccagtatcatcaggcagacaagatctggtgccacaacactagattagctagtgccctctgatgcccagaaaagccaccactgttaatccaatcaggcagagtagagccccatcaccctagtgatcataattcacaaatgtgctttgcttgctactagttgtagtgattagcattctgacctttgcatgcccaaaagcccctgcctccattagctccctgctttcagtcttactctcacttcaccacccagtaattactgcttaaatctgtttgccttcactgttgctgtttattagtgcctatatatacttgctcagcctcagctcatcaaagacttaccaattactacagacttcaagaagttacagtctttgtgttccaaagaacaagagggatttttgcttaggaaggaaaggaaatagaatcacagattggttaggaattaagcagagaggtttagttcagtgttgtgaggtgaagaaagaagagaatgcaggaaggttacgtgtactcgaggagggcgatgctgctggctccggcgtacggacacggggatagctccgccgccgccgccgcggccggggcgagccaggtgattgccggacaggaggcgccggccggcggcgacgtcgtggcggggcccgccgggacgagcagcttcgacgcgaacgtggtgatgatcctggccgtgctcctgtgcgcgctcatctgcgcgctggggctcaactcgatcgtgcggtgcgcgctccggtgctcgagcggcggccggatgatgatgtcttcgtcgtcgtcggcggcggcgggagatgacggcgagctgggtccgtcggcggcggcgcaggccgccggggtgcggcggaaggcgctgcgggcgatgccgacgatggtgtactcggcggcgggcgggccgagcccggcgtgcgccatctgcctcgccgacctggagcccggcgagcgcgtgcgcgtgctgcccaagtgcaaccacggcttccacgtccgctgcgtcgaccgctggctcctcgcgcgctccacctgcccgacgtgccggcagccgctgttcgccacgccgccggtccggccgttcctcgcgcctctccggccggaaggcttcgtcacgccgtacgatttttaaactagacaataattattggctgcattattattatgcaggttagttttgtggtgtttggcgtaattgtagataaacaagatttgtattagaggcgaacttgtgagttacttgcttctctgggtgttcggtccatcgaatgggttattcgagtcttctcatttcaactcatgcatatgcatggttctgtcttttaagtggtactctctcagtaccaagaaatagaggttttacggaaaaaaatttggtggagaccgggtgtaatcggcctcatctgcagccccgcactggatgattgccacgtggactagctaagaatcgaacgggtcacgtggcccgatcggctctaggcgctgtgcgaggaggatgcagatggcttggctccaggcgtagcgaagacgcggctttcagcctcgccgacggctcgattcaacacatatcgcgtctcttcgcctggatatcggctacatcgacgaccgtctttctccgttcccgttccaggcggccgccgccggtgagccgcggcgcgtttggatgcactttaattttgatcgattacggcttcgacgatgaccctgcagcgcgttttaatttgcatgttttcttctcatgccatggagaagcggccggcgacagcacctgaccctcctcgagtctaaacggtgttcaagcgctgtagcctctacctctagctggtcagaagcaatgtcggtggtggagccgtggtgctcggcacattggccatggtttccgcggtgctggaggaggaggaagatgacgatccctgcagcaccggaggaagacgcaggtcactgctcaccaggcaaaggagatgcgcgcgatatatatgtgtcgaatcaagccgacggagagcctgaaagacacggctgctcgtggagccaagctgcgtgcgtgtgtcctcgtcacgcagcgccgggagccgggccgagctaaccgtttgatccctaggtcattcacgtggcatccatccggagcagggctatagatgcggccggttacatccggtcttcaccaaaattttttccggttttactgtgtttgcattctaaaaaggcaaagatccaacgctccacaataaaaggtaccacttaaaaagtattttaatattggcacatgtacttaggtagtaagggtaaaaagataatattctagtagatagagaagggtataattgtctagttcttggtatataggtaccgcattggtactggtagttgtcatctccatgacattatttacgtgttctttttgagatttacattttttccttaagaatagattcgcacagtaatcattcatttcgttttttacaagttttgtagaattcactaattaacaaaattttatgtcttagggaattaaataacttattttataatgtcatccatacacttagattttaatactgacctgaaaataaccatctccctgatttacctcatatatgataaaatggaaaccacccccgattgcatgtccatttattgggcatatatgtgcatgcatgcatccacggattgcatgccactttagaaggcatgcaattgccgcaacgtccgcaccacatgccaaatatccagagatatattcgttgtagattgcacaaatactcaaccatgacgaccgtgtctccttgcgagtgcacttattcaaacccttgaagaagaacaggggagaactctgaatgaaattgtgagctatgtaaatcagtaatcaactgtgtaaatggaatcttagcggatgcgcttcgccttgccattgatcggtcgacctcatctccgcttcaatcctcaaccatgttgatagttctccctttgttttttttctagtgaaccaattcaaaccctagtaagaacaaagcgatgtgggagacgagaaagaagacacaacctgattttttttccgtgtagatctaattgatgcctaggtagatttacattttctctatcgtacagtaatgatcaacgaagcaaggtattcaatatattcgacaataatggcaatatttcactagttaattacttcattttcattggttatgataatttttattccatacattgcccctcttttgatcaacggtgcatattactctacctcttaatacctctaagtacctcacaaacactgtaaaacctctctaaaatataagagattttagttggatgagacgtatcctattactacgaaatctatatagttatatttttaaaacagagggaagatactttaatctatagatcattgggtgaatggtattttagtttagagggtgacaagtactagatctgtcaattacaaccgatttaatcaaccgaaactagagtttttgcatgtcatcaccctagtttccattattatgtgttctatcctttctcaacttttacaaccttgttttccacgcgcacactttctaaaattgtttccaaagaaagtctataggaaagttacttattaatccattttaagttattttaaactaaatacttaattaattatgtgctaatcttttatcctgttttccgtgcatgtgagaggttcccaacctctcgtctcgaatacaccctttagagcaagtttaatagtatagcctactgttagctccaaatcacctatagtcaacttaatagccaattcatacaatagttatctatgaatatatactacactattaatacatggtctcatctgtcatacaaacattgtgtcttagagtccgtgctgcatctagttataaatatgtagcctactactcttcactcttttcttttatcttcccaatatgtatttatagttggcttatagcatctgctattgtacctgctcttagccgcaactctttcccaaattttgactaatttgtgaccattcatcagttccagaacctatggtatatcccataccttaccggaaaaactttgaacactactatctattgtaaactatttgatatttctaatgatatattataatgttctacaagtactatttaagaaaaatctaccatatttttcttacgtatctaatatactttttcattaaaaatatactgatgttcttcaagttaagggctactttttggaaggttgattttttttaaatacgataatagaaaaaaacataagattggaatgcaatgtaaacgaatcccgtagaaattgaaaacacaaaaaaaattgaaagatgatatgtctggagagctgaaaggaaaataacacatgaatatggaaggattttagagagagataggagagataaagatagaagatgcattgaacttcttaaaggaaaaataaaatggggtttgaccttatttacttaagggtataggaatgcactccaaatgaatttggcaatatgcaatcctatgctcctaataacctacttaggaaaaaattccttaggatttgaatcctctagaattcctataaaattcctttaatttaaaggagccataagttttttgaggatggtgatgggtaaaaaataaggaataaagattcctttggaacaaaggattcttgaattttggaggtttttaatcctacgcatatgtggtcatttggataaaagaaatagctacaaaaaattgtatgaaattcctttggattggctaaaaaaaaaagggattttagagaaattttaacatgaagtctaatttcttaggaacaaaaatatcttttttgtctatctctattttctgatccctgcatttttttccctgtgcttcattcaaatggttattcctacattttttccaacgtttcttcaagagggagtttcacaaaaccccaaccccaaattttggggtgtccatgacacaaatccttaggttttataatttgtttcatggaaccccacattttgggacaaaatatttcataaaatcctggatacgaagtttatattgttccatttaactaataagtttttctataattaatgaaaaaagttgaatgacatttttttaagtgcatatccacgtatatacttttcaacaagcattgatcattatcacatcgttgtttgattgtttacgtacatatttaaccgattatcctatcattatcaggttaggattatgacaattttttgtgtagtgcaaaattgagaaaaaaaaagatgagtagaaatgggatgtctactttgagtcaactgatgtgaatctatgtcaaaataatcatatcaataaaaaataaaatatgaggtttattgaaacattttaccacaaaacatgggattccttgaaacaaatcataatctccggtattggatgaatagaatggttacttctgagagcaggtgcagtgtgtgcatgcttaaaagttgcattagccaatagcaatgtccggggatgtcatcataaaagctactcccttcaccccctaatataaaggatttttaacattttaccattcatcttattcaaaaaaaatttggaattattatttttttacttactttattatccaaagtactttaagcacatcttttcattttttatatttgcacaaattttttgaataagatgagtggtcaaacagtgcaagcaaaatgtcaaaatctcttatattatgggatagaggaagtagtatacaatagcgaggtgaatacagaacaactgagaggatcaccactggcttaggctaattttgttgcttgttggtgggaactcatccctcgcgcatgtagaatggagtgactcgttaatatatgattaattaagtattagatatttttaaaaaataattaatatggttttttaaaacaattttcatatataatttttttttaaaaaaacgtactttttaatagtttgaaaacatgcacctgaaaaaggaaaaggttgagttaaaaactttaacaaaaagatctcggcccagttaaccaatcaagctactgaccaagggaaaatggcctgtgttatggtgatagttttcaattgctcatggcacctgcctgccttttcagatgaaagggacattccggtactgtggcaaaactaccaaataatggtgtaggaaatctcactttggaggatagcacataagccgtctttgattttcccacggatcttgttcttcttcaattcctttctgactttcacagttatgggatgcaattagccgagcaatcagcattgatgtatactagtagtggttgcacgactccactaaggtgaagaacacaatggttggataacgtatattgtctaacatttgtgaaacaaaacaacaatgatgatcaatacaacatttgagcccttatttgtgctcaaaattttgtttcacgaatgtatgtatgttatcctaccatcgtgtccctcgcaacattttcactctttggacacacagtaatacaatgcaaattagatcaaaaatgaaaaacagtaaaccaagcacccaaacacctaaaaggtgccacaccttatcgcactgccaaaaggagcttcggcagcgtccatgtcctggcattttcattcgtactgtcgtacacgaaagatgttagcgtgcatcatcgcacgagttggacgagcaccagagaatcagaatctctctttttgtaacgtgtgagcagggcacaccggccacttaccatatgatccacaacgttacaccactgaaactgaagggaaaggtcagaaacaatatgtgtgcgacgcatccagcatccagatggagaattcacctgggacaaactggtttaacgttgcacatctgctgaagaaaatcggatcgaagtggtctcttttgtcagcaaatgagctgtcgctgcgtcgccatttgcacaagctgcaagcagttcaaccagcctcctctatgacataccagatgggcctcgtcatccgagaacttgaacccaatcagtatcttgcgagaatttgaaccccaacagtcaataatggaagtgcaaaatggattcatagtcccacatagagtacacatcatggcacaacagtttgaaatatactccacaaaatcacaacatcttggagcattctactcggattatgtagacaccaaagataagaaatcgttattaccagctcgtggtttttttaacccgatacacaaatccagacactggcatacgtgcaaaaaacaagacagaagcaatatggaaaaggcaaatgacagcattccgtgctcattcacaatctggggatatatcaattatgaaccgaaagggaaaaagcatgagccaataacgcagtacgaacccagatgtagagagttcaatgcctctggcagaaataaaagtaaagtggcggttgaaaaactgtcgtattatccgacaggcaaaactttttttcttacagatattaagcacctgacatgtctacagggcgcagaaacgatatgattattctcactgttgcgtaaacggtagcaagagagaacattttccttgtcattttaagctatcaaaaagcttctcggcaacctgcatggtaaaacataaccaacatgagcaagatagtttttaccatgatccacaaggaatcagaagaaaaacagaatatctaggtcgccaattttggtggatcttattaaggtgccagtcaagattgaagtagatattgacatttcatggctagtacatctctttgatgtgagtactaagtacccatacctgttcacttagttggctgggattttcggaaggttaaaatagaaaatagagacaagtggtttctttggatcaacaattcactcaaatataagtgtatatatggcaacaagcactcacatttttgtcgacacatttccagtaatcgaagtattgaccagtacaatgcttctgaccagtctcatcatcttcaattctcttgacacatttctgtgtgcacaacatagagtagcataagataagatccaggcccagcagtaccaaaggtgcagaagaatagctattcagaaagcaataatgtacagcaatatagatagcatggagcttctccaaataatgctcggattgactacatttagataacagtactgatacattaatattgtgaagttgaaaactaagcacaaaacgccaaatgtatcggttggatattaatagcaaattaatactgctatctagttgagatagctgggcacatagaccataaaaacaaaatgagagttcaccaacagaaaaaaaaaaacagcatatacctgatattcataccactggtacacacacttagccttcgatcgatcctctaggagtgccttcgggtcagatacctcctcatccgacctgaattagagtgcaaggctacaagctcaggaatataataacaaaaagtcgcactatttgttatataactaccacaaatatctttgatggaaaaccataaaatgcaggacaagtttccaaatgcaataccgggtacttgccatgcatttcaataaatcaaacaataagatctaaatttggaaagagtaatcacaatattatgcagtactctctttttcccaatagcgccttaaccaccagtgcataaaacatggatgcaaacgcaaaatatgatacaccggtttaatctaatgagattgtacacagtaaagctatagtttaaagcaagtcaacctttttttcagaaacaagcaagttgcattttggtcaatctagagttacttgatgtgtccacgcatggtgcacaaagatgagaaaacgataaaaccgcaacaataaaaagaagctgtataggtgtaatgcagatggcaaggcgctggagtgtgtgctcacacccattcgatccccatcggcagtcagcgtgtgtgttaaactctctcttaattacatcgatatgaaaggaggagctttcatatccagctgttagaaaacaatagaactgaaacaatcaaaactgacttctgcatgggcactagtataaatatttgacgctttcaatcttcagaatcagttcctactaagttaacagcacacaggagagtttgctaatgtgctttgctaaactatgaaacggtaagcaccatagtttgatgctttcggtcttcagaataagttttgcactgaaggtatcatcacataagactataagtgtttgcattgcaggtgtgctttgctaaagtatgaatcaaaagaacttcaagcgtcagcatcataatgcagatgtagaaggaacctaatcaattatagccaatgctaggcttcatgaatgacatgggaattggatatgggtgctgggcaaccagaattagcacagcataaacaaaaacatatggaggacgagataatcagataggaaaactctcactttttttactagatccatatcactctgccctgcgacctcgcaagaatcacgcgtggctacatcgcatccattcgctgcaactccccacgacacaaaagccatccaccgacagaaaaatacggccgtgaaaattcggtcggagcaaccgcgatgcaagttcactgaatccccctacgatcatggcgcccgaatcgttccaaatcaaaaccaatcaatcccccaaacgcatggccaatgcagcacgcccgatccgttccaaccaaacaggagaccgaccgaccgaccgatcgactaccaagcaagacagaaaaaattgaaggggacgggatcaggtgagagactcacatgctcgcgacggccgccggcgaggcgacgcgaccccctcgacgaaggaagatccggattccaactgcagaaaacggcggcgatcagagaaagcggggaaaggaaagagagagagaaaaataaacagcgcgctgatcagcagaatacgacggcggcgggggagggggatcggtcggatctagtagacaggaaggattaccggagcggcggcgagggcggagggcggcggcggcggaggatggtggggaggcgagggagggatgaggtgaggggtgaggaggaggaggagaagaagattccggacccttgggtgggccgggccgggccgggccctgtgggcaggcgtggggaggaagctgctgagatgggccgattagtaggcccgtaggagagccacaaaggtaggaaacgttcgcaagagatccctcatttcttcgtcgagttccaaaacggtccctaaaccgaaatctatcttattatgaatttgatgatgttcactaactcctaaaatttaacatgcaactgtgtcgtattatcatccactagcagttattatctagagtacattaaatcaaatgcaagtatgctgcatcatcacccactcgcaattattatctagagtattttaaatatcatacaaatatgacatatcatttacatttttttttaatttttagaactcaatatgaaagaatatcaaattattatattcacatcatttttacattatttagatatatacatctaccatttctataatgtatagcatacattcatccacatattccgcaacaaacctaagtatcaactaataccaagatatttcggctatggttggccggttgttggaccatgtatgggcaaccaccatgaaaagaagagaatgtctaaacctagcataccaaacgcagtaaaatgcatgtaccattggtactataactttaacttgtaaggtgagtgcacattagtcgttaatcttgtaaattgctcaagtaaatcgctcaacttgtgtgctgagggtgcaaatattatagaatacatgtcacatggaatatttgttgctaaattaaaaaccctattggtataagatgatgcacttgtgaaccgtatgggtagaacaaggttgcaagtttcaagtttagaaaatgcaaattaaattccatattcttacatgagctcctatatgcatatgatttctggtcaacaaaattgcatagtgcttagcaataaaaaactgaattcatcttaaactagattttactatcaatactattacaccattggcttatttgtagtcatctttatgaaagaaattaatatgacatctaatttagaagattaacgtcccacacaacatatgttttatgttatttgcatctcagaaacaaaatgggtgactcgtttgagcaatttgaaaaataagtgacttaattgcactcatcttacattggtatagcttattctaccatatagttcaccaacacggtcctacatacttcatacttcattcatcaaatccaacatcctaaaatcatccaacgcatcacatccaacatctcagatctgctcccttcccctcctacctttcccaaaatgtcatgtccttcggaaaagaagtcctacaatctcctcccctcatcgcgtggctcccacattattgtcaccctacgcacgatgcatcaccgtctcaccgcataagttgcctttccatccccagcatcaatgatcagtatcctcggtcttcattcttgccatcctgtcacctcgccaccacagataagggcttctcctctttgtttcccctgcttggctgcttgcgtattctccaatgcagcgacgtctacttgacccgtctcctgaaccagcgccggcgagcccatagtgcgggagcttgtccatctctccccctgtcgctgtcaccttccacatagttgccaacggtgaggttttggctcttgtgcctttcatctccttggtttatttcttacttttgttgggttgatttggtggagttggtgagagaatgggcatttgttcatttggtgtgcgatcttttaggagggttttttttttgtggggttttgggtatagtgcaatttgttagcgatggtgtggaatccgaacaagcgatgtgagagcagagtggctgatgcagcttgggtaggttttgcatagctcctatgaatggaaatgatggatttggtggccatgatagaggttttgcctgtaggggtgggcaaagaccgaaccgaagaaccgaaccgaaaagaccgagaccgagaccgagaaattcggttagtagttcggtcttggccattaaaagaccaaaatttattcgggtaattcggtcattgccctcggttaaccgaattaaccgagaaaaccgaattttggcccaataagcctaggaggcccaataagcccaataaactactaaaccctagaggcaaccacacatccaatccctcctcccaccagcctcacgcagcgccgcctctccccatcacgtcgcactcggctcggtcacaccgtctccgccttctgcctccaccgcgtcgcctccgcttccacggtgcctccgccgcctctgccttccgcctccacaataccgactctgcctttccgcctccactgcggcggcgccgcctccacctccgcagcttcgccttccgcctccacggcgccgcctccactctccgccctccacgctccgcccgtctgcctccatcgcgccacctccgccgggcgccagcccgtcctcgacctccatcacgccggcgccgcctctgtcggtccgtcctcgacctccatcgtgcagacgccgcctccgccggtccgtcctccacgaacccgcctctgcctcaacgccaccaccacgtcgcctccgtctccagccagactgcggtgggggattcgatgcgttcgcgtttgagccggtccccctctgtcaaaattcggttagaccgagaccgagaccgaatttgtcggtcctgagtttttttggaagaaattcggtcctcacttttcaaagaccgaaatgaccgaaaggccgaagaccgagaccgaatttttcggtcagaccgaacgcccacccctatttgccggtgccaaagccgcagcgctcggtgcttgaacatgatgagccatccacttatggggagcaggaggagcccaaggagagtgccggtcggcaacaggacggtaagaggaaatgagacgaggaaaagcaggagccagtggcgcagaattcactgaagctggttaggaagggccctgaggtcgtgtacttagataggaagcgatgcctgtgattgcactcttcccattgtcattggacatgctcatgctacagaggtgaagtccatggcaatgggaagagtgcgaagctgagggtgaatggcattcaatagccattaccttgaccttgtccaggttactttttatatcttaatgtccaacatattggcgatggctccatggcaggcatcgtcctcgacgctaaaggtcagtgcaccctccccattttgtcttctccctcctcccatcctctatccctctcatcttgccaccagcagttgtcctgcggggcagtgggtgatcgtacttcttcacggtgaccagcggtagcgagtggtcttgaatttccaaatccatgtgatgaattcaatattggttctgtgatgttttattttatgattttttttttgttgcgtatctatttcatttattttttgaggaattccaatcatggcttaatttctatgatgaacttgtgacttgcttttcgatttatttttagtggatttggatcattggctcgaatcgtgttgagccacttttttttttttacaaatcgagccgagactctagtcaacggtgcagcctgacgggtgcaaattgccaaatcctacacccacgtggggttgacaaccgacaccgaaagggttttctatagcaatgattcaatttgaaaacttaataatagactcaattagcaattacttcatttgaagtaacttcatagttttcacttcaccatctaaagcaagcaagatttggtggtgcttggtacttctcaaagatggtaaaatctccttcattgtatacttagaaaccatcgagaactgcaaactaattataggtgctgttgtttctgtatttgccaaaaaaaaaaactacttctccttgccctcaaaacaatgaggtccacgatagacactaaaccaggattaaccacattttatcaccatatattcacagcctataaaaacactccatggttggtcagttttcactaaccaatcaataaaaagcgttcccttcttcctcccattaaattttctctcgtaattaaatttgacaggcatgggttcttccgtcggtgccactattttctactgcgtcgcattgtccatggtcatcgtgatgacccaattgccccccaccgaagcagactctgtagcaggtagtagcacatgcatgactcctgcaaaaaaataaataaatactgatcagctaataactaactccgcacatatcgcctttccttttggtgcacatattgatcacgcacactcttgtggacatgcattccagcggcagagttcgcgtcctccgacctgaaggcggacaagttgacctcgcgcaagctgatgggcgccgctaacgcgccggcgccggcgccgctaggtaatcgaccatactagtagttgcaattttggttcaaaatttcggaccccccagtacaagtgattatctcgaccgaaattttcagtttttctcaattttctacgaattagattaaaatttagttaaataatcaatccaaaaggtgtcaaaaatcccaaaatttcaagaattttggttgtaccaaaatgaccgaaatttccggtgaaatcaaaattgaaaaccctgaaccatactaccgcgtccatgtatgtgtggttaatagcttggcgatatatatgggtgatctaacgcgtgcgtgcatggtgtggcatgtggcacacaacacagggatgtgcccagtgcggttcgacgagatgaaggggccattcaccgagctaggaaagaagtgcaaggcggcatcggtgacggagtgttgcgacgcgttcaaggagatcgcgtgcccacacaacacgctgctcaacgacctcaacaatgggtgtggggacgatatgttctacttcatccacacctacggccgcctgccgcccggaaccatcttcaagaaatgtgtcgagggaccctatgggatgaagtgctgagctcggtccatatcactccattgttgctagcttttggcctgatttgtactctacctaacaacaaatgaccctttcgctgccttgcaatgtaattaagaactgtgtataattaaacttgcttttattacttcaaaatgcattgcactacaaaaggtttattataactttctcccaggatgtgggttatgctgaacactaatacatctaattattataagggattgcggcttttgttagaaaaaaaactaaattttataaattctggtctatttgatcgctttgagatttgtacaacaaccaaaaacctatctttttttcctccttcccatccttagtcccgctcaccgccgccgctttcatatgctcatgtacgcttctctgcctcatgtggcattgacaccctgcctcgtcagctggtgggttgaggtcaaaggcgccggcgtggaccactgagaaaaaaatggaggactggtgccgacagttcatcacgaaagaaaaaaattcacagtgcccctgccctactgtcttcgtagaatgatgttgtaaccatcatttagaatgaggaggatgcaaccatcacgtagaatgaggagcacctttccctcgtgctcgtcacagttacgcatgacgtctcctactagggtgcatcatccacaggtaatctgtggatgtactgtatagaaactccatgacgttggctaccggtatattgccataagatgaacgaacacattaatagctcaatgaaagcaatcaattaatattagttatgtatgatagatagacaaacatacagatagatgttgccatatgccataattttgaccatgacgtaaatctaaagggttcgccaacacaactagatatacctctacagagtatttgcatgccaagctatgtctatactatagtggtatagtggtattattcgttttgtcacaccacccctaccattattatttgggttccacagtctatactattacaccatcctttaatgatttatctctcgtttcgcagttggctttccccaaattttaaaatcaactacttgtttaataaggaaaatcataaaagtactacttagactaaatatatgcttaattgatttaataagctataaacacaatttgttttccattgtaacgtatgggctcttgaatagtgtactttactataccaaaagaaatagtaataacaaagtatttatagttatagattgatttggcttgtaaaaaaagtagcatgctaataatgttttggagcgaataaacaaaaattttgacgtaacttttggcatctttggccttttttttgggagtgaatcgaagagactgttcgggcatccttgtttccatcaaggacagtaatcacggaaaacagagcgatccattatcatatgattaattaagtattagctaatttattttcaaaaatagattaattttatttttataagtaacttttgtataaaaacttttaaaaaaacataccgtttaacggtttgataaacgtgcgcgcggaaaacgaggaggggttagaaaaaagggtgccaaacacacccgtactgtcttgtgtcgactacatacaacttaaatccgttagcaatggtagagagcgaagtagcttgcactaaagaaagagaagcccaggctgactctctcaagcctgcactgcactgcacgtattgaaacttcaagagagctcaaattgatgagtgctaattaaggccgtgtttagttgttttggcaaaaagaaaattaacgtatatgaatacacatttgaagtattaaatatagactaataacaaaagaaattatatatttcgcatgtaaacggcgagacaaatctattaagcctaattaaaccgtcattagcaaatatttactgtagcaccacgttatcaaatcatggcgtaattatgttcaaaagattcgtcttgcaatttacatgcaaaccgtgcaattgggtttctttcgttcacatttaatgcttcgtgcatatgtccaaatatttgatgtgacggaaaagttggaagtttgaagggaactgaacagagcctaaacataattcaagtaaggcgagagatggcgccgaacgaagcagacggcgcgccaagtctccaccggcggcaaggcgccgatcgaggaagcagcgcgctggcgacgaagaagccgcaccgcttccgcccgggcaccgtcgcgctccgcgagaccagaagagcacggagctagctccatgatccccgcagcaagctccccttccaacgcatgcagcacctccgcttccagagctccggccggtcgccgccctgcaggaggccggccgccgaggcctatacctcatgggtctcttcgaggacaccaaccaacctctgcgccccaaggacatccagctcgcgcgccgcatcagaggcaagaggggcctagcccttgccttgcctggaggcttcttccgtgttcctggcaaactggcacgtttttttttttccagatttcagtctgtaggttgggagatgtgatgctgtaatcgttgtggtttgctaatcttaatggaaatgctatgccgtttggtatttctgaactgaatgaatgcttcaaagtggaatgtttcattttgttttgtgctaatatgttgaaattttttgaaatgttggatcttgcgaactgacattttgctctgaactgaaaaaaaagtttccgcaggggttgaaattaacccttgaaatttaggcttacatgtttacattccagggaccgtatgctatgcagaaacttgtttcatgaattcgttttacttgcatttcatcaaattgcgaacatttaggaaagtcagcaagagatactaatttgacaaaatagacacatctcctagcatttatacaatcaaagcacaagtgtgacaagcttgtacaaatgagcttatgctattgacatatccccatcataatggcatatttctaaacctgcaactctaagagtggcatgaaatctaatccttccaaagatatcatctctagttctctactctgttctacagactagtcctacatggttcatgtaatcatgttcacatacaggctacaaaatagtctacagttctgcaccatccaccatccgacgattgcaagagagctaacacttcgttggctactgacgatagatcatggatgtgctctgaatgtccttggtggcttggtatgtcacaattgatgagcgatatgcgggagaatttaacattcaaattgctaatcaacacaacaccaagtggctgtcactctggaacttggtgagcgctatcactgctaatcgtcagctagtcatgctgcgtagcatggcttgaacatgctgctgatggatgtacccaggtaaatggctgttcttggtagcctcaattactgactgatatgaatttgagaagttgatttgatcttcaacagagggccagttctgtcccaagagttatattgaagattgaaacaaatgtgcactatgattttcaacagagctgttgatttctacaaaccctgaaaagatggacaataaacagcagaaataaactagcaacttcatccattaactgcttaatggccaacagagcagtgacgtgggccatgattaacaaaaagctgagtttaattaaagataaagatcctgctatacccatgtgtagctacagccatttttcaattcttgcacattgtgactttaggaaattctgaaaataaaaacatttatagcatgttgacctatattcacacacaaaattatgtaaagatataatcatgtataggtgtgcaacaaaaattatgtaaagatagatcagctttctttctttgatgaaagataagacgatttagttttctttctcgtatagcacaaattgatcatatctgcatgtaaacgtaccttaaaatgctctatatgtatagtttttttcagaatctaaattgccaagtgcaaaatccaaagtggatggagctacacgagagttaaaaaatctaaacactttattaaattagaaagtaaggaggtggcaacttcaaagcttcatcaacatgaaagtgaggaaagagacaactgtgaaactttaccaatttatacctgctgattatgttgattgttacttgatggctgagaaaggtatgcagcaaaaccaagttcctgaaagcaatgaccgtgtaagtaattttttcaatattcagatacggcgcaaggggcaccatttcttatcaaaaagagagtaacaggcaattgacaatactcttgatacagtaggtaagcttgggcataggcctggttgtgactgcactcctccataattcagttgccccattggaaatggattagaaatgtcaagaccctgaaaatgaaaaagggaactaaaaattaaccatgttacatacaataactaacctcagggttagaacaggctacacaacttcaggtacatctaacatccatgcccagcatatatattgaaaagaatccagatggcgtgatgaattggcccggcattggaatgttggactaaaacgttgctgaggcatgaactatagtgaattcaagattctccagcccaaaatacccataatcatagtcctttgagctactatcagttatgaccacagtccatggtggtatggcataggattttaaatagaaaacctctgcattgcagaacttaaaagctgtagaaggccttaggaactacaaaattgagatgaaaaataacttgttcaatataaaattttaatagaaaaagaaacaacctgacgttacaggtttttgtgactgattccaattttgcatggagttcatatcacattaaaaagaacaatctgacaggaattctcaattgaaatgactgtagcaatataggattgttgggagtttacataaagcaaaggttcttgatgtcaccaccaactggctaccgtttagaataatatcagtttgtgattactatcacgttatgccatcaccatataatgaacaacaatgctgaaattacctgaaatagaacatttccaggttgagcagcatccaacatggtatattgtattggggattgttctggttgcactttcttggttttttgtaaacctttctcaatacaactttttcgttggcttttagcattacgacctttcttttttcgtcgcttcggtcttgtgctgcttgaataatccagtgctctttctgattcattgtcagtaccattcgcagacaaggatattgttacatcctcaatatcagactgaggagctgacgcatcaatgcttgtttgtttctgcaggatttcttcaattttcttacccagttctactgaacattgatctaatactctgtacgactcctcgcattctgatgctcgagcaacaagcctaacatatactgggcacaagtattcatagcggctagaaaattctaatgtggtatctgcctgaacctttcgaccttcaacctgcggtgcagtcaaacaccttccatatttggtccatcgcttcaggatgtacctatcaggcatatactttatgtccattgtatctaaaactttcaaagcatggctacacaggaaaccaagtgtctcaaacttcctacatgagcatgtaactgtctgctcacaagggtttccatgaactttataccgtctttctttctcaagaatggcaacaatatattcacggctgggaccactttcatcacgagtcacaatgtaagctgactgaaactcttcgtattcttcttggaaaagctgaaatatcataccagtataggcctcagaagcttgtctcagaataggagctctaatcttgaagtctggcaacttgagcctcgaactaaattcaacctccaattctatgtaccgtctatcattgaccaatttcttaagatgcttcaagaacgaaataatatctacatcagatttcaaataatcccgaacgtcagaatgtagacgttcatttaattgtgtgttcttcatcccagctgaaaatatccactttgtgtatggcctagcccacttctctttttcttcaaataccttctgcaaccacacgttgttgtgaaggttatatttactgatcatagcttcccaagcagtaaaaaactccacctcctcctcataatcattgatgcatgccttgaattcctttatgaaaccacaatcccctctaataaggtgattgaggttactttttgcagactgcttcaggttccatgtacatatggcatggcatgtgtcaggcatcaccagtgagatggcctttgatacaattgcgtcttggcgtgaaaagacagtccgcggtgcttgtccagacatcgcatgcaagaaggtctcaaacaaccactggaatgattcaaggctatcatcatacataagtgccattccaagcaaaacagtctccccataattgttaaatccaacaaaagaagcaaaaggtcggagattcatgttgtttctggggacaatatcaaaggaaacaacatcaccaaattgaccaaaatcaattaccatctttgcatcggcccagaaaatgtttgtaactttatcttcagcatccagctgtacagcatgataaaataaaggatctgctcgacattgatcctggaggtagtttaacagagcactggcttccccacacttaatttcccgctgccgcctagtatgcagagagcgctgagagatttctggggacttaatagttttctcggcaagaatggaatttctgctatcaggttcgctagcatgtgttacactagcagagttatcagcatcagaagactgaacatcacttaactttttttgcagtggatttgcacaggatggaatgaacaagggatgattatgctgtgcctcgaaagcatatacctcatactttgaagtatcatttttgcgcctgatgactaaattagcgtggcatcctgttcttgtatcaggctgtggagtcctcgtatggttggttcgtttgtctggggctttgaatccttccctcgaacaaacaaactttcttgaggttatttcaccagttttcctacttttgtttgcatattctcttcggacactgaaccccaacttccatgcgtaatagcgatagaattcatatgcttcatgttcagacgcaaactcttgccctaaccatggtgtataatctccagtcgctgcttggagtctgggaatgcaaggacctgcttcgctgtcctcaacagctgtgttacctaaattattttaagaaggaatttaaatctaaaagcatgatcaaaatgcaaacgtatctgcataggacaattgaaaatcaagaatatgatcaactagaaagtcatgtgcaaacataatggatatcttgcggtttattaagtgtggcacggtcttacttgggcactattatcaatttgcaaccgcaaatgccacaatttgatgaaagacaataatttaccggcactagtgcactattctccctgcaacacccaatcgcgttgcacattcttcaagaagccctaataaaacattttactctttattctccctgcaactttgagtaaaaaaacagatcgaatttcagacccaattttgagtgtacagctagggtttgagctaagcgcacatcaacaacgacatctgcaaccaaaaacgataccgttagggccgtacaaagcgaatgctacgattcgagggaccggtgctctccttccacctaaaatccgaagccatcgacaggtccaacgcccgagcagcttgaggttttgaagcccaaaaaaaaaaaaaaaaaaaaaaactgagcagcttggggtttggtagagagcgaagggggtgcggagagagagagaggctgagagggagacctgagggagcgggaggaggaggaggagggacaggtgtagggttggggggtggctccggcgagggcgagctcatcgccggcagcaacgggcggcgcggcgcggcgaggcgaagtgctttcctgttggcgtctcgtgtcttcttttttttttccctccgttgctgctgcggcgacgaggttggagactagtaaatgggccgtgtcaggaaagcccggtgggtgatgacaggtgcttcatgggcccattcttttattgggcttggggatggtgcagatcgagaaaagggacgatatgccactctctaacgtgggttcagataaaatgccactcaatacaatacaccggataaaatgccactcaatacattgcctaccggatgaaatgccactttagagattttttacctaaaatgccctggagagagagggagaggggagggccggctgggcggcgccggaggcctatcgggcggcggcggaggcggccggcggtgacaacagggaggggaggacagggcggcggtggcagctggtagggacgacgggggaaggaggacagggcagaggaagaggcgactgcagtggagctcagaccgtcgtccccgtcgccgcccgggcggtgctgctcgccgcgctatcctcctccctctgtgtcgcctcctccacctcctccccacgcgtcgcctcctcctcccccccccccccgtcgtccacgccggccgctgcccagcaaggcctatcctcctcccctgtcgtcgccgccccatcctcccctccccgttgtcaccgccggtggcctccgccgctgcccggcgaggcctccggtgccgcccggccggccctcccctctccctctctctccagggtattttgggcacaaaaatctctaaagtggcatttcatcctgtaggcaatgtattgagtagcattttatccgaacccaccttagagagtagcatatcgttcgttttctcggtgcaaatcatggtgccggggccgaaccgattgccgctttgccatctcccaccactattttgagctgccctagggtagcacaagtagtaagagtttaccaatgagacatcgatttttcgttaatttcaaatgaacaaaataggtcgagtgcatttcaagtcggctccagatgttggaaatcataaacccaaaaagctataatggcgtctggacttattatacttactctgttttatattataaatcattttaattttttctgattaaatttctttatgcttaattaagtttatagaaaaaatatcaacatccacaacatcaaattattttttcaagtaaagaaacatcaaattagtttcattaaatgtaacattgattcattaaatatgacattgaatatattttaataatttgtttgttttgtgttataaatattgttttatttttataagcttggccaaagttcaaaaaaatatgtataagacaaatctctttatatgacacataaataatttttaataactaataaataaatattaattttgtatgttatatctacaaataatttatcccataaataatatcccacataacaaactcatagatataaaaatctcatgcaacaaatttctacccttcaacaatataccccataaatatatatgtttctttatacccaaggataaaatcgttttttatatgaatttaacagtcaactaacaaaaagggtgtgaagggacctaactgaaattcgggaaatataaggaaatgagcaaaactcgaaggcatggatatgattgggtaaaattttagaggtacataacaaaaaaaggtgcgaagggatccaaactgaaattcggatatataaggaaattagcagaactcgaaggcatggaaatgattgcgtaaaatttagaggtacacaggggatttttctctatacttttttttttgtcatgagcaacagcagctagcacaactgcgaaagtatggacttcaatggagaaaaccccgaatcaacatcagttcaatactactactatttactactccctccattttatatcataagtcattttgaatttttttgtagttaaacattttaaagtttaatcaaatttataaaaaaataaagcaacattttaacacaaacaaaatatattaaatttagtgttatagatgttgcttatatttttttataaaatttagtaattgttttaaaaaaaattgaccaaaacaagattaaccgattgactaataattgactagtgcaaaaagaatctttgcatacggctaaaactgattttttttccatgcgagcggaacaaccgcatgcacccaggtgtcagcaaaaattaacttttttttatgtgggcagtgcaaccgcatgcaaaaattggattttcgcataggtcacttatgccaactgcatgtgaaaatgatttcagtgaaaaaaataaatattctaaaaaacaaatttgaaaccctagctcccctgttcatccccaaaccctagctcccgaagccgtcatcgtcatcgcagccaccactgccaccgttatcatagtcgctgtcatcgccgctcccttcgtccctgaactaggcagatttgctgctcctgtgggcgccggtggtggatccacccagtccgaagccgccatcgccgctcccaaggacaagggctgtggtctccgcccgaggccgccggatccacgcgccctcgagccggcggctgtctccgcgtggcggcactacctgcccccaacgccattgtctccgccatgtgccagacgggaagtggaggaaggaggaagaggggaaagtggaggtggaggaggaggaggaggaggagaagggaagtgaaatggaaagaaagttactgagaatgaaggaaagagaagggcagaggaggaaaagaggaggtggacaggctaaggggtaagtgaggaggaaaatgtattttcgcactcgcctcttaagaggtccatttggaaaaataagtctattttcgtagacggcctacgataatgtttttttgcatgtggcccatgaatcgttttttggggaaacgatttttgcagggtgcgagcagttgtggtccacctggaacctaaagagttctcattcagaaaaattgtttctgtagtggtgtgttttacaaaaccacaactaagaaggtttacaaaaccgtgcggttaccgcacagttatcacggttatcacgtgtggtaatcttttcagtttttgaaactatggtatatcacatggtaaccgtacggttttcacgataaccacgcggttaacatggtaactgccaaaccatggggtggcgataaccacccaaaaacgacgttaaagtgacctataatatgaatcaccgccacccaaaaatggtggcgacctataatatgaattggaaggagtatgtttaagcgcttatgttatttattgttgactataacctcacatgggtacatgacgacataatgttccctgtgcactactttaatccagagcatgcaactacagtcatatgtagcacaactttatcctgaaacattggctggttaaaaatattttccggcggaagcacaattgcaagctctattgttctaatccacgctacagtctacagactagctgacgatcgagatttatatccatccagttcttttctccctctcggaacttggagcaggaataatctgaggaaaaggggcacgagcgaagattaattaacaagctcctgacagggaacagcacggatcaatctgaaaatgcaagaagcatcaacaagcacgtccgtcgatctttgtgttagggaccaacctttgtcatctctccattttgagagaccaacctttgaatctgcaagtgtttatagctgggcaaatggcttatttagtcactgatgacatgcctaacactgatgtaggaaaagaaatcgaagaaaagaaacctgaagaagaagaagaagaagaagaagaagaattcaggttgccctttgcgtgttgtgagctgacgcatctggtccagccttgggtacgtacgtgctcaataaaattaatgattcaacctgctgtcaatgcagctataggcaatgaacttaaaagtacagtcattgttaggtataggagctttgtacttaatcacaattaatcacaagccatgccgacgactgaaaagaaggtgtcgttgaaaaagacagggataatccccaaaactaatcgagcccccagaagcaagggttggttttccgtgcgcacatgggctattaaccccatcatgattcatgcatggtcgccacacgccattttcttctactggctctctctagaacaaccatttttttactactcgtctattctttaattaatcagccgaagtgctcatgtaattagtagtagtacttgcatgcacgcatgttttgtgttttgactccaaggacgcagcagcagcggcacgaagaagacgacgccagccacacgcacgaacagtccggccaacatttgatttggttagctgaagaagattaattaaagatatggtggaatcctaaaaatacaagttccagttggtgtcagccataaccatctttgttactgcagcctcgtaccaccaccatctacctaaccaaataaacctagtccatgttagagagagggagagaagaagaacaaaagaagagagtgatttttttaagagaaaagggattaaattagaggaggaaaacgaagctggtgagatcagccgaaaacgacgcctcgtttgcctcctcctgcaggcgtccactccactcgcatatacggagaagaaaattatgatgaaaataaaaaaaaggagagaaaaagaaaagaaaagagatggaaatctcctgcagaagaagtggccggttcgatgagcccccatgaaccggcggtcaattcatcgccggcgtcagcgccaccgcgcccggccaaggagaagccgtctctctctacctgcgcgcggcggggcccgtgcgtgtgtgcgccgtgcgcgccctctctcggcgcggccggcgcggcggcgccaagtgctctgcaccgaatcccacacgtcaccctcctcctctccaacttgcctacggacccgggacccctcctcgactttactggatcttttacactatggtccttctgcaatacccatttcataaatactccttccgtcccgaaaaggaggtcgttttagcgctgaagcaatgtcccgcaaagagtgttgctgggagcctgtcttcgtagttcagacctactctgccagagctcagctagtctgacgttctgccacaccactcaccgctctctcaccccaaaccagcagacatgaaggtgtagtaatgatagaagtataggggcagtacaggttatttttgcattgtcttggtactctcaccagaagctagaatgtcaagtttaaagggacagagggagtagaccctaaggaaaccgattcgggtacggatccctagctcggtgttagcgaggttggtgcgaggatacatgtgcgtatgccggagatgttagcgttgatgttccaaggtgttatcgtcgggctgttcctgtttggcatcgacattgagctggtgcaggcggaggccaagctttgaaacagcgtgggcggcattttatcaatggacgccttcgtaccgtacttcttcccagagctggaggactctgcagcgagggacggagtgatgaggacatcacttcctcggatatacacgcaactttacacgttacaatgataattccgagtccgagtccagttcggtctctggagacagtactgacttcaaacggacctagcaccttcatgctaactcctatttaggtgatcttggacttgatggaaaacatacctcgtcacctttcaaacgcatcttatctcatatccaaaatcatattgagtcaacgggaatcgttaaaacaagataatgttattgctgaaaccgaacttgggggcttaggctttgtaatagactaggcccatctcgaaagtgtctccctccacctccacgaattagcacttaaccctagctctagttttatctataaatgcctatgtacaccctctagaacaattaagttttgtttagttgaatttttgccaagtgtcattcaacttgtctctagtccctcactcgattagtcagcgattataggttcagagcccccaatagttggtgatttgccgggtcgattagatctaccacttcaatcgcaactatttatttgtgcttagtcacctattcgcaatatttagattgcattatcttgttgttgtagtgttctctagtttgcattgcagggatcatcaacggcacgtcatggttggtacgacatcgtcctggacttgttctagttagtagccatatcgcaaacgtcgcactcgatcaaagcgagagttatccccttaccaaaaaaatgggccacgagagagtgttatcacggagggaagcagcatgacgagctgaggaagatgatggccgacttcaacaaggcggtgccgacgatgttcatctacccgatctagcttgagcccatggtagatcccgtgacactgtgcaccaggtagacataagagagtgcaacatctcacggtagctagtccttcgttactagatgtgtactctaagagttgtgttcccttgccgccgtttaccagtatgtgaccaaatattgatcttgcttcttggcccctttacgtcacacgttgaggggttcgacgcgaaggccgcattattgcaaaccacgaaggtgccaatcttagtggacatactcaatgaggatgcagttaaaatcaaaatcatttgcgtcaaatcacattggcatgctcatggaggagaaaggcaagtggctagcatcgccgctagcgatggtcgtccagttggtggaccgcgtcgacatccattcccttcgtcccaagctcggcctctgaccacacggtcttgaagctcggccctcgccggcactagctcgacatcggcgccaagcaacctaacaccgacccctttaccatgtttgcatcaccaccggatttggctccaacgtatctgactcaacacatgaaatctcggcaccaagctcaccgacgataaactataggtccataactttcaaagcttgtttataaaataagttttagaagaggaccataatataaaaatccatgtcgattttctctggcctagtttgtttatttatcttttatcccctttttggtgcaatcttggaaatatcttggtttttaccaacatcttttgtgcgtattttagttgcaaactttattgctccgcgttcttcctttctctgtgtttgtttgtttccagttgccactaaccagccagagccccgggggggagaagagcgagagaggaggagaaatcttgcagcaatccctcgcttagattcgccattaccgccgcttttgttcccaccaagattaccaccccctcctcctcctgtgctcgagcgctcgcatcgcatttcaggctgcttcttgattctgcgaggaggttgaaatctctcgtggtatgatctgatttcgggttgattttcgtcacgcggtggattccttccccccaacactattccggtgccaacccttttttgttttttgtttttttttgtggctgttcttggcgtcgcctctactggcttcttgccgtgctgcagattgcaacagctgccatccgttcgttccggtggagtgcaccccttcatcaccaaggaggagaaaaagctgtaatcttcggccgtttctgcctttctgcagcaaacggttgaagaaaagccgcgtcttttgggcggatttcgcggaggccgcttgaggtttttaggcgtggttcgtgtgagcttctctttggaatttgtgggggaaagagtgagggagggagggagctcagtgggagagatggaggggaatttgccgccgagaggagcccttgtccatggccatggcggcggcgtcggcgccttcgatctggaggcgacgatgcagccgccgccgccgttccacttcgcccaggatccgcacctccaccaccaccagggcatggtccccgtccgcgggaacccgatgctggatttgggcaatgtggtcaagacctcgccgagcgacgaggaggacgtggatgacggccaccaccatggtggcggcggcggcagcggtaaggaggcctcccagtggcaccgggtgaagtggatcagtggcatggtcaagctgctggtgtccgccgtggcctacatcgacgaggacgtcgacatggactacggcacgggcagcgccgcgaggaggaagcacgccatgctgaagaggaaggggaagtggaggctcgtctccgcggcgatgaccgagaggggcttcccggtgtcgccgcagcagtgcgaggacaagttcaacgatctcaacaagaggtacaagaggatgaccgagatccttggccggggaacggcgtgccaggtcgtcgagcaccccgagcttcttgaagggatgcggctctcgggaaagctcaaagaggaggctaggaagcacctgaactcaaagcatctgcactatgaggagatgtgctcgtaccataacaggaacaaaatgtgtctgtttgatgatcccgcccttcagaagtcattgcgtttggcgcttaggagtggagaggagcatgcaaagaagaacccgtttgggtatgatgatgaggatttttctgacgatgacgacgaagatgaagaattcgatgatctggaggtcagcgctgaagatcatcaccatggaattcatggtgccaagaggctgaagcatgatcaggaggagacgcattttgggtctaatctgtcagaagttgctgttattgacatgaacaaaatgctctctgagggatctggtggtccaactgctgaaaagagtccctctacccctggtatgcgtgatattcgacttgaaaaacgccgcctgaagatcaaagctcagatgctgaaaattgagcagaagcatttcaagtggctgaggttcagcaaggagaaggacagggaattggagaagatgagactggagaatgaaaagatgaaactggagaatgagcggttggaattggagctgaagcttaaagaaatagagatgggtatcaaaccaaagaagatttttagtgattgaagccttggaatgatagaactagaaatggttagagttgctggtgatccttttgtcttttgcaggagcttgcagatttagggtcttatatatacattgatctgtgcccctgtttgaattttaccttagctaactgcaatcggtcaagtgaatggctattccagttgttaagtgtttaaacttggtactagttggcctttcaaatgataaatgtttaagccgtccttgtacatgcctgctgttaactttctgcagttgtttgtgtgttgctattgacctctgagtcttttttcttcaaattgtttacttttattttgctgctcttattactttggatggaatttgttggggctctgtcatggcctgtgcagatggtgtgtgatgagtgataacatgaggccatggctcaatacgacaatgcacttgtggaacatcagtaagtctatcttcaccatactttccaggttggttttatttaaggtggttgaaagtcgccgagaagtgtttcacagatgcttaggatattatcagtttctactcctatccttatatcaaccatatttctgaattagcatgcaaggcaaccagtatccgcaattcagctctataagctactaccatttatgcaggttctgcatttgtggcaactggtggactacagctcttctcccattctaaattaacactaatctagttgtattgtactagtattgttttctatgtgtgtggtcagattgtggcatcttgttgatgcgattgtggtctttttgtgtaataataataatcccattctggtttctgatgtggtggacagaatgcctggtttcagtgaaaactgatgaacaggtggcacctttccgttccaactgcggctgttttctccaaccatgtaaggtaagtgtgatacgtccagcaagcttgagaaattcttggctgttttctccagccatgtaaggtaagtgtgatatgcccagcaaagtctgagaaattcttgaattggtaaattatctcacaccattgtaatttgtgaatcatatcatcatcagttgaaagaggaagctgagtcccccaggtttttattttcagttctgtttgctgttgactgaaactgaatagtgcaagctgagaaacaagctgctcatgattgttaccaagataaatgactttcctgtcaacaactactactaccacagcagcaaattagagtcatgagagtgatcattttccaaaaagaaaatacaggcacgaatgatgcattcacatagtatattatatatacccatttgcatcaatgattcaatgatcctgtggagcaaaggaatcacaaagaccattctttcagacaggagacctgctggaatgctggtgcaggcgcatgattgggaggaagattttaacaattggaagccacttggccatcacattgccagaaaaaggtcccatggagcaccacacacgaatgcgtcgttggtttggcagaataaaaacacggaggaaaggcaccaatttttttttgttgctgttgttttttcatatgcgaaagctcaaggggagcacatgaacccaggtgtgttgtgtgtcagttaattctggtgatttgtcctgcagatgcccagcagaagcagggcagcagttggaggacgaactggaacaagtagaagtagagtgaggagaaaagcctaccaaccgggctgtctcgtcccaaagttgaggcgcactccgtaacgtccgaaatgattcggatcttggcttggggcattttctttttcccataattcgtacaaattttgagtctatttggatgagcaaaagtgttcagaaggtgtccattaccagcgataagcatggcaaccatgttgaacaatgagaaaattttaaattttcatttaacgttttataaatttgttaaggttactgggcactcaccattatcgcaccgatggtaagtcatggttaccgcgataactatatggtaactgatgataaatagaaaggaaaatactatacgtacgatttatatggacgatcatcatacgattgctaacatattgtggatgtcatgtgttgctttgttagaaacggccagaaaataccatgggatttggctggcaaacgttacatcttacaaatatcgtacgcaaataatcgtacgtatagtagctttctaaagggaaaccctgccatggacatggatgaagcgtgtgtgcttgctaatagtcccttcgtcctatattaagcacaactaagtttttatgttcaattttaatcgttcgtcttatttaatttttttttatgattagcatttttattgctattaaatgataaaacatgaatagtacttatacgtgacttatgttttttaaatttttttctaaaaaaatttaatcggacgattaaagttggacatagaaacttattactgcgcttaaaatgggacagaggagagagcagtgctttgttaattctagcgactgatgatgcaactcaggtccgacatgtatgtacgactggccttgcctgccaattccatccatcatcagactccagagatgaaaaaggcccaggaataattcgagtatggattggttgtaacggctttgcacactgccaatcatcttatttcttgcaatcatgtacgtatactgtcgtacatgtaaccactgtattatactccatggtgtgcagattttcgctgtactgccagtaatatgatatggaccatatggtttaaggaatatagcgtgtgtgatgcgatttttgtttattgaggttttcctgggtcctgtgcccccggccatggcgtctgatttgtcggagagacccaaaaaaaaaaaaggagaaaaaaaactctgcatttctcgatgatagcaccagctaaagcacattcgctggagtacatatgcacgcctaaagctccgtgattatcatctcgtcctcgcatcgtcggagttgtcattagtctagtcgtctccctcgtctccggtgagctagctggtggtgtggtggttggttcttgggagcaatgggggcgtgcgcgacgaagcccggtgacctcaaggtgaagggcggcgaggcgccgctcgtcaaggaggacgccgccgtggcgccgtcgccgccggccgctgaggagaaggagaagaacgtcgacgaggctccggcggcggcggcggcggcggtggtggtggcagccgtggagggcgagccggctgaagccggtcgccggaggtctctcagcgacttgctcaaggaggtaagcaacagctcggtttctgcccgtttcgttgtgcgtcagtagcaagcttgagcttgagcttgagcttgagatttcttcttcttcttctcgcaggatgcagagagcgagggatcagaggcggctccagctccaagtgcagaggcaaccaaggccgtggaaactgaatctccggctgccgctgctgaatctggaatagcagcagcagcagcagaagaggagaaagccgaggtggttgagccctcgcctgcgacgtccgagcaagtcgcagccggagaagaagaagaagaaaaggaaacagcagcagcagcagcagaagaggagcaagtcatggcggttgagacctcgcctgcggcgcccgagcaaggcgcagccgtcggagaagaagaagaagaagaagaagaagaagaggaaacagctgcagcagcagaagcagaagaggagcaagtcactgtggttgagccctcgcctgtgtcgcccgagcaacacgcagcgggagaagaagcagaggaaacagcagcagcagtggagcaaatcactgcggttgatccctcgcctgtggcgtccgagcaagagacaaccggagaagaagctgaagcagcagcagcggaaccagaagctgcccaagaaggcggcggcggcggcgcgcaggaggtagcggaagaggagaagcgcgtggatcctgactcggttcaggttgccgccgcggcatcatcaacaccatcaccaccatcatcagctgatgatgatgaggaggagaagagcaaggaagaagctgctgctgatgtttcagctccggcggcgcctgatgaaaactgacgcctctgcgcttctgcttccgcgagttcagcgttttctgaactctgaactctgaagacatttgttttgtttcctttttcttgtttctgagagatactactacctggatgcacatttggattgtctgagattgtttcaaatatgtcgtgcttgcttgcacaaatctttgagagttttggtactcttcccttttttttgtgttttgtgttctaggtgagtgtatcaatctgtattcagtttattgaacattttagtatactgtttgtgatttggagcgtgtgaaactacacagtaggagcactttgcaagaatctgtggagaacagctcgttcttatccttgaaagagcatgagtttttagttgaagctttgtcgttagaaaatactactccagagtgaagtagtagatccttctaatttaggggcttcgtgcacccttaaatcctgctgaaacaattgtgaacaaactgagaaatttggtgatagagaagcatggttggcaacttggcacgcatcatgcatgaaccatcctacaaatttatagcctaacttcaattaagacatacaaatccagttgtatgaactatttagtatttagcaactagctctatcttatttagagatgtgttgattggacttccaatttatgtgttagtctggattatctaaaaaaaatgtgctagtctggattatgcttccaaagcctcaaaataacataagtctcattttcttttaataacaaaaacacttcatacagtcataaatatttgatctccaagtccaagaaaatttggtcaaatttttaaaattttgatcataaattttactccatccgttttatattataagtcgtttgatttttttttagtcaaactttcttaagtttgaataagattatagaaaaatatattagtatttgggactgtctaaaagtcattcgacagatttttagtagaaaatcagtcggattttcaagccaccacgacatgcggttcaaatgaaaacatatccacgtacgtcagtcaccggacggtaatcacgtcaatgatgcttaaagaaaaggaaaaacaagcaacttacatctatttacatcaacttacatatgtaattttaaaacttacagtgtaaatacaccaaaattacatatgtaattttaaaacttacaatataaatacactaaaattacatatgtaactttgggtacttgcaatgtaaattttttttatgaaaaatataacggtatatgtagtccaaaaatatcaaatcacacctcaaacaattaagttaactatagtgcaacaaaacaacgatgagtaaaaaattctgtacatgtaaaacaaaaattacacccgcatatacttaaaattacattgtaattgtagtgcacttacgttttaatcgtggtataactatgttgtgagtgggtgtagtgtaactgcagtgaaagttttaaaaaaaaagttacgtatagaaagaaattagttgtttgctgcttgctcagttggtaggatgcatgtcgtagcatcccgacatcatgggttcgattccctgttctagcgacatttttttttcactcaatggcacatgcacgtatctcaaagtaaatcatacggtcaacaaatcgactgatttttaacagaaaatctgtcccaagatatgtagcaattccgataatatatttaatgctagatttaatgaaattaatttaatattttaaatgttgctaattttttctataaattaaacttaaaaaagtcaaatgccttataatatgaaacggagggagtataaattaaaatagatagaattttatttggaagagaaatagtagaacttttcaaggcacataagcacatacaatttattttataactaagtatgtgagaagttattgactcaaagttttgaaagtccactccatccggtcataaaataatttacatgtctaagataagattcaatcaaacttttaaaattttgaccatcatagaacttctcaaggttttttttaaaaaaaagtatttgacaagccaatgtctcaaatttcttaccagattctacatgtcaaatgatggaagaagtaacattctaagaaaactttccttactggggcgcctctgggccggcctggcggcccaaccaatcaacgaattcagcccaaacaaacatcatttactgccgaatttattcggcggtgatgttgtgtgtggaccgacctaataacttgtgcgtggctttagcagcaccagtaatgcggccgcaccttgtatgaacaaatgggctcactgctccgcccacgcgccccatccacccggcccgcccggcgtccgtgaccgaattgattgaccattcttcttcctattactactctgttttgctgtagagtgagtactaatactgaagctgatgggtggccaccattgggctgctgcaatagtttcatctgtccattacttcctctaaatgtaaagttgttttagacttgttcacgcgaaattgagtactagtggtattcaggtgacaggaatatgaaaaaacaccgatagtgccttgcactgggactattcttcactgagagcaactccaagtctgcaacaacttacctatatcaggttcaaccgaacacccgtgtagctagctcttaaactgatttgacaagtcagacttgttactctcactccaacaatcattttattcgaaatataacatgatccatatatcagcctctactcccttcttgattattcatgtccgtcgtctgccatgtctccgcactcacccacttccttgtcctcaacgtggccggccttgttgtcaaccgcatcgtcgtcggccggagctctacgggaaactgttttaacagctcaagtggacgtccacccgtttattgcatgtcatctaaatggctatgaaaaattttcaaaaaaattgacaagatagatcaatatgtaatatatcactccacaaacatgcaagttcaaattcaacttttacaagttgtaacaaaaacaacaaatttaattgtaaatatacatatagtaatttgagttttgtttgttatttttgttactacttatagaagttgaatttgaacttgcatgtttgtggagtgatatattacatattgatctatcttgtcaatttttttgaaaaatttttcatagccatttagatgacatgcaataaacgggtggacgtccactcgagctatcagtacccatctccggagctctacccctgctcctcctcgcaagccgtggatcttgcaacgccattgagagagagatgtcggaggcctatgcgagagagagagagaggagatgggataaagtggtgggattcatggttggcaagccaaaatgactctcaagtttggaagtgagcaagcaatttggctagcgggatggtttagtcatccagttggtaaggctgttggaggccggatttcgattaaaatttttaaatattgacttgaaaaatcatttagaaactctgttagagataatgtaataatgcattgagtgcatgaagaaatcaattaccaaatgcgttctagtttaccgaattccccatgacatgaagtagaaagcgcgtgcatgtgccaactgctgtttgtgcaattgagtggtgagtactagtaccagcagggattcagtatatactgtgaagtgagcactagtaccatgcaaatgcttttgcttttctctcaaagcagccacagccacacccatcttttagttcctctctgcgactactgcgagtgcgcattgctaatccggaaaaaaggaagacaagaacgtggccatgtaggtaaaggaaggcgagctttgtttacagatgatcagagcagaaagacaaactgagatgagataaagaacatacataaacaaagaagctttatcactgctaatactaccctcactgctgctgctggtactatagatactatagataaagaacagctagtgtaatgcccagaaagacgccatcatggtgatgaggccaaccacaaccggtgccataacggctcgagcagaagcagctgctgcccccacttcctgcaaattaaaaacacacacatattcagcaaccaggcagacttatacacatttgaaagaaaaacacacacaacttgaatggtgtttggaattaagcaaatatggatcggaagactgcaaaaaaggttgagttgaaaagatcctccaaactttggtgccatctcgaaagctactgtctacgaaaagaagtgaaagagagagagacatagaaagtgcaaaaggattggcagaaagaagaagaagaagaggagagatgcattgcatggcatggcagacatagcatgtactcgtacctggtgcttgtcaccgggcgtgggcatggggaggatggtggccgtgtcggtgacgccgcgcgggacgggcacggcggggctgctcctgatgaacgccgtgccgccgctctgccccggggcggcggagtccggcgccgacgccgaggcgtcgggggacggggcgcgcgctggtgcccacgacgaggacggcgatggcgccgcggcgtgggcgtggccgtgcccgtgcgcgtagtgcgcgtggtggctaccgcctccgccgccgccggtgtgtcgctcctcgccacgcccaccaccacgtcgccaccgctccgtcggcagcctgggccgcatgtcgtcgtcgccgccgccggctcccgacaccggcgtcggcgcgggcgccagcgacggcgacggcgacgtgggctcccgcagctccggggaagggtccggcacgatgaccgccgacagcggcaccttctcctcctcgccgtagccgccgccgcgcacctgagcaacaaacacgtcgcccgcaaagcaagtcagctcgcgctgctactacgtgatcgatcgcgatgatcacgtgtcgtcaccatacgtacctcgatggccagcagcagcatcagcaacgcgacgccgcacaatgccgcagccgccgccattgccgcctcgtcgtcgtcacctcgagctctccttcttcttcttcttctcctcctctccggcaatggcagtgtgagactgtgaggtggcggtggcggcaatgtaagcaagcaaggaggaggaagggagggaggcaggaggtggtggggcgcatgcactgcgcttcaattcactgcaccgcagcgacttgtgtgcgtggacgtattggtgtacaggctgaaaagcaagcaaaggagaaagagagggaaaaaagagggccaaagcccaatgggcagagtgtgctatcggccgagcaagtaaagcctgtagcaaactaacaaaagcgagggagagagagagagagagagaggtgacaccttttgcgactttctggccgtcatgatgggcagaagggttatgttaatcggcggcctggattcgccgatctgagtgacccccgcatcggtaatcatcttcttcgtctccatgtggattaggaggggctactctaatctctaatctctcctggattgcagtgaccgagtaattaatcaatgaatgatgaatcgagaggtgtgtgagagtgtgacgacgcagacaaggagacggggggcggagatggtgtggtcgcggttggaatggattcaactttttgggttgggtgattgggagttgggacccaaggcaggcagaggcgtgggattccgatgcgcgcgtggagtacgaggacgacgcttttggggcccgataattgtgacatcaatggccggcacgcgcaccgccgctgtcaactgtcaactcgcctgtctcatcacccgtggctctgaacagaggttaactctgaaatttagcttcaggagttagatctggagtggagttgtggagcaattaaaacacatctcaacatctctagttcattttacgagaatgctccactcaacttcgctcttattttatgtgctgaaagtagtttgaaactgttcggctgagctttagctccaataacaacacaacgacgattgtcgccccaatgcaatgcaaaaactacagcgtctactactagtactacaactcctaattattaagcccgcggagtaatgttcaaattagagcaaggataataatatagctcacttcctactattagcctatcttaaagccaacacatataatagtttagctataagattagctacaatttttttctcatctctctatctctcacttgtacataaattgtatttgtcttggagcttgtattaagttagctcttgcatgagagctggcacccttaactttttgttacatctctcttccacataagcttatatagtagacttatatctcactattatacttgctcttaggctgtgtttagttcagcgcaaagtttggattttggttgaaattgaagatgacgtgactgaaaagttatgtgtgtatgacaggttgatgtgatgaaaaaggactgaagtttaaatcgaaactttggatctaaacgagtccttagtagtacatgtgttacgattgatgtatacacgatcggatggaagccggcgtgtgagaagagaggcggacacgggagaagaagctgcctgaaaaggggctcaatcatggtgccatgatgcgggtgtgaggattaccattggtaataatgcgcttgtaatcagacggacaaaacagaatcattgcatcgtcttgtttaatactccttccgtcccaacgcaaccatgagtgtcaatctataattttttatttataatttttttaatgattagtatttttattattattagatgaaacataaatagtattttatgatgtgtgacttgtgttttttaatttttttctaaaaaatttttcaaacaagatagacgattaaagttgagcacgaaaactcatggctaagtttaaaataggaccgatggagtagcgctgacttctatttcctccatcccataataagtccaattttagagctccttttattcgtagggaaaacataaaaaatttgaagaattacaattctattgaaaaattttgcctttgaaacaaaagattaaatcatatcctatcatttgaaatttctatggaatgaataatcctataaagattttggagaaaaattagtaagagctccaacctcttaaaatttttctttgagtctatcacttttatctaattcctgtgtctttcctgtggtccaatcaaatagtcattcctatatttttcttgtattttgcaatcttctattttgcacttgcattcttatcaaaagcatgtgtttttttattggcaaaatttgctacatgacactaaaaaatcgagtaattgactgagggacaccgtaaaaacttgacattgcccatggacactacaaaaccaaagacattattttataatttccgtgccgaaagagggaagagaattgtcaaaatgacgggaatgcccctctcttctcgatgcagcaaacatgtgggcccatgtacagtgtcgtcgtccttgcatcacacgagcaactttcccacggcctccggcgcggatgccactgcctctctcatcctctagtcgtctcccacggtgaactcgcgcgaacatcgggatggcgcctggccggaccatctacgagcgagctgggcagcctcgcacctgcacgattgccgccatgcagcagattgctggcgtccttgaggacccataccagatctgggaacagctgcgatgagcgtgttcatgatgtggcccagatcgccggctatgagggcattgatgagaccttccttggtatcttcgtttacctcatccgcggacaagacggcagccaaggcatcgacagccatcctgacccacccgcgcttctccgtcccgtctccggtcaagtaagggacgagctccggcggtgagaccatggcggagcgccgccgctttttctgctgcacgccgagccgtcctggctcaggccgtcgcgtcggccgcgcgctgttcctctgctctgccgcgtgcgtgaggaagaagaagaagaaggataggagagagatgtgagcccacttatgattagcaaatagtaatcaccctactaattagaaaaaaattagtccatgacacgtggggccaggtggttaaaaacctattataaattagattaaacatacactgtccatgacacatgggacccaccggtgtttaaagaaggaaagagaaggggcaatccgggcatttagaaaaatatctcacctgttttgacccggaaataataaaataatgcgatcagtgtcctacagccaattacacgttttttgtagtgtccatcagccgtgtcacgttttcgcagtgtctctcagccaattacacgttttttgcgtgtcctgtggcaaattttgccttttttatttctctgtttgttattcctgcaattcaaaggggcccttagctctttcaatttgtcccaaataagtttatttttagagcaatcattgcatcaaaattagtgaaagtagggaataactatattggaggcagagtagtaggggtattatagtttttgattttgtaagtatgtgttagatgggtgaaaaatgaatttattttgaaacttaaccatcatgtgcttggagggatggagttaggaattaggatgtatgtgaccaggttcaacttttcgatggagaactggaatttaactgaaagcggtatgatttttttttattttattgaatttgggtcaaattttactatttgaaatttgatttctcaaaaaccatttcaatttgcacttggaatctactttcatcccatatcgaaaccacgaaatatcgtgtttatttttccgaaaatttaaacctagcatgtgcccttgtcaattagtttttagataacacagaagtataacttcagtgatctctcttcacggaaggaaataaactaccgtaatctgcatcaataaaatatatccgttttaaaatatgagaatttttgcccaaataactttaggatggaggtagctcatatacctcttcgttctaaaataaaagcatttatatgttgttgacaagtataatatggttaagagaaaataccatcttttcaatcatctatgcgatcaaaattttaaattttgaattgcttatactcctcccaaacatctaaatggctaaaaatatatggatttttgtgtattggattcaacgtccccaaaatacataataattatattatggtataaatttcgaaccctaaaattcatggtatattttagaatggatagagtagtaaagctaggtttgaacttgggagtagctatacaacattgaacattttcttttataaatctttcaaatgattatattaataaaatttaaatataactatagcgtaattgatgtataataacattgtaactaaactataatcataattttgcatataactgaacaaaactggtccactcggtagggacacgagcgttcgcgaattttttcctcatcgttgcatgatcacaaagccatcaagtggttataaatttagaagttttggggagaaaaatatcgaacacgttttatagaaattctgttaacttatgttactaaggtgacattagttttggatttaatgaaaatcttatagccacatttcttaaagttaaacattacctttaatgttacggatttgcgatgcataatcaccagtagtcctgtgcgcacaattgtgcagcagtgtacacgtctataatttatgcaatgtaaaaaagttcataggagtgtaaaaaatccttccctgtggcgttatttttcagaagaaaatagttaatcaattttgacacgattgatgggcccgcgcactgagtgcggtggtggtccactgggctcactctgtcgtgtggtgcttgcgttactggagaggaataagttcattttaggtcccttaccttgtcagcgagttcgattttcgtctttcaatcgaaataccagatataacaggtccctcaagtatcaaaaccggtgcaatatagatcccatgacagaatagcggggtggttttgtcccatctggtaaatttacccaaatccaaagtgatgagttagtgtgagcccacatgtcacttcaattctatctcttcacccccccccccccccaatatgaggaggacagcagctggcgttgggtggtgaggaggacgatggcagtccagagtagaggccggaggagggcccccaggtcccagccaccggagttggcgaggaaggttgccgtggtggagcttgccgtacaccgtcgacgccgcgacaccaggaggaaggagatggacgagctccacccgcattccatgtcagcatgtaggcgatgtcttccctctgcgcaagcccactcctcgacgcagaagccgcgcatggtgagtaggtagagtgtccaatgccgccgtcctccctcttctccacggtgtcgaagctgagcaattggggggggggagccaatgggtcggcgatgacgagctcctgtgattaggacgtggccattgtgacagtccgataactgccacggtgccagtgccaccgtcgccagccaaccatcgcggagaaggaagcaaagggagaagtcgccatcccagacatcaccagccctagtaacaatggtggcggcgggggagaaggggaccaacatcgaggctggctggtcagtatggctggggtggtggacgaggcagtcgaggaggagggggtcgtggagttggtggaagcggtggaggaaggcgacgcggaggaagggcctgcagacaagaaaggagcggacgaggttggtgccggtggggagcaggaggaaaacctcccaagggaggtcgttggtcagcgtggcgatgatgatggttgacatgccattcccatcctcgtcgactactcctttgcaccgactgcatcccaacgttgatgccggtgacatgttgttcctctcatcttctcttcgcctcactacccgccactggccgccgtcctcctcaccggccgccgctgagatggaaacgagggaggaagatagggatagaggtgaaagaggtctgatacatggaacccatgctaactcagcactgttgacttgttcaaattgccacgtcagacagaaccacccgctgtactgccatggaatctatattacaccggttttaatatttgggggacccattatatctggtattttggttgaaggataaaaattgaactcgctgtcaaattaagggacctacatgaacttacacctactgaagatcaaagggcgggttttgtctcttttgggccaagacgaattagctcaaacacatctcatatgtgggttgtgtggcttattcattagtattacaggggcccattgctggcaccatccggcccatcgttcgacaatcgatccaccgaccgtgcctggtcagtgtttaaattaacacgcctaatagtggatcaccgaattctttttctcctacaatattagaccgtgtccttctctttgctctcacaaacattacatgagttgtgaagagacatagatatggggtgtagctctttttttaagtattgatccgttcttgagtagaagcaactaaatttcttaccctgtccttatacattgtatatagaggtgtcttaaagagaaataaatcttatctctactctgacttaattgattcacaagaaatgaatttatgttcgaaaataacattccataacagtcagtatcggtagcgccatgccatgcatgcaaattcactccgttgagaatgacacgcgccgtattgattgatctctaagttctcaaccatgcaaattaataggccggagagcctaggtgagaatgtgagatattgcacatttcacaagcttagccgtgtcttacgcccttcatttcaaagaagaaaaataaaacgaaaccaaaatttctgtgtgcagcacaaacgcacttatttaatactcagtgcggatacagaattaatgtacatgaacacgaagtaaaagcgacgacgtatgacgacgaacaagaagaagcaaattaagccatcaaccacatgcatacatgtaattatggggagaaagtaattaagcatataaaccgttcgttcttgcgttcattcgatcgggatcgatctagtattggtcggcggcgtgcttcttggcgtccttcttctcgtggtgctcgtggaaggcgaaccccgcggcgcccagcgcggccaccgccgccacctcctccttcaccttgtgcccgtgcgcgttctccgtgtccttcttcgcctggtgcttctcgtgctgcaacgacgtaccacaaataaattctccgttaattatctcttaattaatcagctatggctaggtagttatcattagatcatagttcaccactacataatcgatttttccaagcggctaaaacatataggttagttaaagtgggggatgacatatacgtctgcgaaaatcgattttcttgtaatagtggtggtcaaatgtactaattaatgacttacgagagcgtaggcgccggcggcgatggcgccgaggccgccgagctgctcgaggtgcttgtggtgcttcttctccttgtcgtagtccaccacgccggagctctcctcctccccgtccttcttgtggtggaacaggtggtggtgcttcttctcctcagccatggctagctactcactgattaataatcttagcttccttcagacagagttagtcggttgccggtgttgatctgtgcaaaagctaactagcaaagcacatgtatttatagcaaggagcggctagcatcagctacttgctaataacattagtttgggcctcaaatctcagtttagagggggagggcgtacttgggcgtgtggtatgtgttacgcgcagttgttgttgcaggtatgaactatgaaccctcaaaagtctcaaggaatcaagagagagatatactgtttgggataatggatatatccatctaattaggttaattagctaatggcctatttaatttgataaagactcgttcatggtcactcaccgcgtaatggcgcgctcgatcgatcatcaattaattaatcagagccagtcagccactgcaattatccgaatgggacgtgccagctggtgacctaagatgcatcatcaatactactactaattaactggcatgattattcagaaacctagttactgaaattaccgaatacgtttagttgtttgtacacagtacaatggtgtacataggagttataagtttgccattaatttgttactgcttgaattgtctttcagaaatgaagcagtgtgatggctattacagctcatctgctagatcttcaccttaattggtggaaggacatgcaaacaaagtcaagattcatcagctaagcatcgacatggacaatggttgttagcgtcgaccaaggatttggaaatgtaatcaacacgcggattggccagttgggttttgtcacactccctcggttcttatcagcccggatagagacagcccgacaggacaaagtaggttgaactcggtttcttgatttcttcagagctaaggatacaaaaattaagattcagaaaatgaacggtaaaactgcatgagttgttcaagcacatccttttaacttgtacctgtgggttcaaacctacagatttttctttcgtttgaaattacttgttgttctacctttatcgtgagtaaaatattttcaccgaaccacttttataccttaacccctagcaaattcgagtgcctagttcattggatcaaggtttcaaaaaagttcattagatcaacaactcatggccccacggtgtgatttgggccaagcggccaaccgtcctattttccgttgatgacaacgtgaatttcaagacttttctgaatgagccctttgtaccaattctgaaaccagagatcatcatgcagaccaggcagatcgaaagcgtgtcaggtatactccctccgtcccagaatataataagttttagagttgaacatgattattaaaaaagtaggcagaaatgaatggtggagggttgtgtttggatgagtagtgaaggtaggtgagaaaagtggatggtggagggctgtgattggttgggatgatggataagttgatatattttgggacaaatcctaagtgctaaaggttgttatattttgggacggagggagtactacataccatatgtttagattcgttggtgtagtataagatacgtagatcaatcctaaattgctatgtcctgggatagaggtagtacaaactagtactccctccgtattttaatgtatgacgccgttgacttttcgaccaacgtttgaccattcgttttattcaaatttttttgtgcaaatatgaaaatatttatgtcatgcttaaagaacatttaatgaagaatcaagtcataataaaataaatgataattacataatttttttgaataagacgaatggtcaaacgttggataaaaagtcaacggcgtcatacattaaaatatgaatatggaggtagtacttcatagcgaagaattggaagaactcgcggcttcagaaattcagagcgctgatttggaagcgctcagtgctggaagtaaccgcgggaacgatgcaaaaccacagaaccgtctatgtaaaacacggtatacgcaatctgatttgtacacaagaattttcttgccctttatttgatcgaattgactatattagaaaagaagaacggtgtatttgtgaggaggataacatttatttggcaaaagcaaatatacaagaaaagattaaagaaagagtttaaacaagatttacattttacatctaggaaagaattgagaaggctaaagtaacttacatttggattcagagggagtagtagatatcatttgtccatcccttccctggttttcgttttcactttgaggcgctgtcaagggtctgaatgcacgccttgcgcacgtccggggattaattgtccaaaagaaaactccactagtttctgcctgtattacgatcaatagataacaacaactcacagtaaatatatctgaaacttgacatttttcagttgtaaaatactctcgtatatatgtatgaaatcatctcccgcgcgcatagataatatgtgtatcagtctggcaatttacaagttaactgcaacttatccctttccttttccttcaaaatggttcacaaaattcatcaccagaagcactacaattaatacttgtctgacgatgtagaaatgagctgactttcaaaccaaattacgatcaattgacagagacatctccagcttaataagagtctagaaataaaatttccagcttagcttgactaagtctagaatatagcatatatttccaaatcatatttttagatgattttggtgacaagcgggccacattctcgtggagtcattggtccatttccatgttccagctcaggctgccatgggaagaaccatttctttggactgaaaaaacaaattaaaatgcattattgcatcaatggttcacatggtttcccatcactaattctctaacacatccaccaccattatcgtcataaccatctcatctcattagcaaagggcttctcaacaactgtaacacaggagataatccttattttcctcacaagtatctagattttgtttgctacagatatcaacaaaaatttagtgccaagagagagcacccctgaaacaagtttcactgctaattcaactactaggtaagtagcatcaacgtaatctctcaacctacactacaaaaaaaatctagagctgggatcatgtaaaagtaaaactcaatctgccaatatgaaactgaaagtatgaagcctgcgaagaaatcatccatcgctggttagtgtgaatgctaggagaacacatgagagggtgaaaactatcatagcagaggagaaagacaagatgacacgctgcgagaagcccttcctctcttggccagccagctcaacttcgttcagcagaccccttatttcatccatgtctgaatcttttgcagcctgaaatagtctgttctgaaccttgtcgagctttgcaagccttctggcatgactgttgtctatcgcagaccaaatgaaaccagtcatcctccacaagaggattccgacgtagattgccacgatgcaatcaacactgtaatgatggcgctcccgtatctccctctgagcgctgtggaggacaagaaaccatataacaacagagatccatcccccatatgcttcctgtgacgatggaaaaaggatctattatgataattgaacagtaagtaacagcccaacacagaaattaatcaagatggagttatcatcaggaggaagggccatgcctacgaaaagaaaatagacaagggtaaactgaactcttcaccgcaagagtcctagctgtcacataaatgtagtgcttgattgatttaacaataattatcacagagcatgttagggaatgcttaaaactggttcatgatgtcacttgcaaagaaataaatccaattaatgatgcattgacacaggccatgaaactataaaagcaggcataaccatgtgcattttttaaaagaacatatagcaaggatggcttgatgagtgtataacattctttcgatttaacgtgcagccagttaattccgttttggttttagcagggcataaggagaataaatgaatgcatcttggtcgtgacttgtgacaatctggaagacaaaatagccatagcttaccgtccatgccatagcggtgaggacagcaacaagcatgtggccactatacataagatcactgcagccaccacttgccttcttcagaaaatgataccatgaggacccctcttcaacagttggcctcaaaatgtctactaagaagctcatatgtccccacttaggtctatactcacgagggtactctttaacgaaagctataattaggaaggaagaacattagctactgcaggccaataaaagaagccatatcagtaagggttataagttggatgtgctgaccatatggcatatcctcttgtatgaccctacggatcgcatctggatcagaggcatatggagcatagtatttctgtgcccaaggatgaggatgatcaggtatttgatatcgagcttcagcacaccaaggcctcgcggatggtagaatcgtagcaagaaatgttacagtccgcagcgaacgtccaactgccattgtgaacatatatcttgcagctatgccaagtccagggcctttgatgcagtcaaacagagctgaaaaccccagcatgataaacaacatcagatagtgatgaagactgatgatgggtgctctgaggagatcaaccacaatttgcggaagtttctcattcaatgctagaagcagccactgcccagtgtcgggaagaggagctgtagatctgtggagaaaaaaatggaccagtcttagtttatctcttgttaagatttttatggcacaaaagtgcagaataaacagtgcagtcaaataagcataagcacaaagggaggaagttggtcaggacaaaaagttgtcactgcctcactactagtaatatcttctagtggtagttcaatttcatgggtggagtaaaaaacataccattaatggaaaaaaaaaagtgaaggtgctaacctcactacatatttaactaacaaggcgaaaaaggttatatatggaacaaaatgttgcataaatgcacataaacagttaatagatttctgtgttttccccctaaaggaaccattctatttcctatccaaagcaccactaggatccttaaaaagtttccaagcattgtggacttgagttaatcatccaaataaagtgtgagcaagaactaagaacagattcttaatcttcacgaactaatagaaatgcactaacccacaattgttagatttcagaaacaattgatgtcttatctacagttctcagttctcacaccaatccgttaccagaggtaaaaagtacctgtcttgcaaatcatctgataaataaaatataaacgaaagcaaaacccaatcctaccagcaagcaattcaccgaaatggttttgattggcgggtaaccaaatcaagcatttgaaccacagttaatcaatgctcagttttacacattgctacgagtaaccgctgcaagagcatccttcttcgaaaaatcctaatcacaacaaccgcgatccacaggctccacgatgattagcgcaagaacgcgaacaaacgatgtcaccaagcccccgacatttttacccgaaaccccccaaaaaaagaaaccctcgctgatttcgctgcggccggctagaagaagaagggactgaccggtgccaatggaggccgaggacggtggagacgaagcggacggagacggcctcgcagaggaacgcggcgagcatgagcgccatggcggcgaggaaccgcggcgcggcgcggagctcggcgtcccaccggcggtagaagggcgcgcgcgcggcggcggccagcgccagcgccccccagagcgccggctgcagccggccgtgccaccgccaccacgccggcggcaggtggcggcgcgcgtagtccacgcccacgtacgccgcggccgccaggcccagcccgcccgcgcccgcgcccgcggcggtggatcgccggtgagcccgtggcggcgtgggcctctttgccttgggcttcggcatggccgggaattccgggttggggggctaggctcctcgatcatgggattcatgggccggacacgttggggccgatcgggagagatgcacaaactgttctttgctattaactagctgggtgacctgcgcaattgcgcggctagcatccatataaaattatctatttttctatatttgatattacttaaaatttgttaaatagccattatgttgtcttataattttaaaagatcgaaccttatcatccttaaatttttatagtttttatttaaaagtcacaccagtcgttacctcttactcttttatcacccctttatctgtttacccaatctatcacggatttatttatcttcctttaaacctttaaaaaatagaccttctagtttttagagtccattgtctcgtcaagttcccttattataatttttaggagtgttgtcaaacatcaatactgtaattctccacgatccgtctgttgtctcccacatttattgttattgggattttgaaaattgaacataactatcgttggggttcatcttttactttctagaaatctgcccaaccactgtcggctttactatactcatatatttttattatcattgagattttaaaaattatattattaaaacagccttgaaagaaggtaccacgttcgctgtggggactagaaattcccacattaatcggagaaaaagaaaaggagagtccaagtagaaatacaatctaaaaataaataaaattcggaattaaaaataagcaatattaaaagaagagtccatataaaaacccaatatgtgattattcaaaatttggaataaaaataaaataaaatccgaattagaaaagaaaagaagagtccaagtaggaatacaatttagaaataacggaaattcggaatcgaatacgagataaattaaaattctgaattaaaaataaaataaattctgaattagaaaagagaaaaagagagttaaagcaggaatacaatttagatataactgaaattcggaattaaaaataattaatatatgaagaagagtgcttatataactgaatacgagaataattaaaattcaaattaaaaaataaaataaattctaaaaatagaaaaataattataagagttcttgtaggaatacactttataaataaaaaaaatatcagaataaaaaaattgaaattttcaaaaaattaatcaacctagaagtcaacggtgacaaataacaataaagaaagaagagacaagtaataggcccgtaaaatagtaagatggtgaacagttgatgagacatttacaaattataaacaaaactgcaaatagaacccccaagaacgattaagaggtggaacgacagacatgacgttaagcagtatagtcacaacggttggcgggacttatataaagtaaaaaaaaataaaacacaataacaatcatgttttttttagaatctcaatgataatagataggggagataacgggtataccatataggagtataatggtgtggagccggcggcggttggcgggacttctagaaattaaaaaatgaatccttaaaattcaaaataaaaaataaaataaatttcaaaaatagaaaaataattctaagagttcaagtaggaatacactttacaaataagaaaatatcggaacgaaaaatatggaattttcaaaaaaaaagtccatctagaactcaaacatgacaggtaaccataaagaagagagaaacattaggcccgtaaaggagtaagttggtggcacttgatgcgacatctaaaaactataaacaaaagcacaaatagaatctcaatgatgattaagagaagggacgatagacaagccgttaagcaacatggtcacgacggttggcaggacttctaaaaagtaaaaagtaaatcacattgacaatctgatagtctatgcataactttttttttttgtagggaagggtatttttcacccggtctctatatctaatcggatatatgtagtcttttaaattaggaacttaataccttaaacaatccaatttgaaatttgctcctacagagatttaaactcaggaccttgagatgctactcatgtcactccaatcactatactacatgcgttttcacaatcactgcataaatggagtagtgaatttcggatatctcagctcagtgccatttcagcctaaggcctaaccgccttatacttgtggcccaagtaaactcgcaaactgagatccggtccaattattcctctcaccgaatgtagtagtacaaaaagcccacgcggcgtcgcctccagctcatctcgccgcctccaccaaatcccccccgcaaatctcgccctcccctttcttcctcctcttctctccttttcccaccaccaacggtcgtttccacccgcacccccatctcgcctcgtcggccatggcggacaacggtggccacgaggatgctccgccgaacggagaccaccacccaccggccatcgtcgcgaacggagacgaccaggagccggcggcgaacggagacgaccaggcggaggcggcggcgaacggaggcgaccaggctgcggcggcgaacgaccaggctgcggcggagaacgaccaagctgcggcggagaacgaccaggctgcggcggagaacgaccaagctgcggcggcaaacggaggggaacacgaggaggcgaacagggacttgccgaatgtagcagggattcgtgccccgcgcgaactgcggcgcgtcgaggtggacgcgctccaccaggtcctcctccgcatgccggccgccgaggtggcccgctgcagcggcgtctgcaggcggctgcgcgacctcatcgccacggactccttccgccgcggccaccagcgccaccgctcccgccaccccatgccgctcttcttctaccgcctcgaccactgggccttccccgaccgcgtccgcgtccacctccgcgccgtcgacgtcgccgcccgcgagacccacccggtcatctgcttctcccacgccgacgccgacctccgcagcgccgacccgcgcgtgttcacgatcgagggctcctgcgacggcatcctcctcctctcctaccacaccaggctctacgcctgcaacccctccacgcgccggtggcgccgcctcccgccgctccacgacgaccacgtcatcgtcggcttctacggccacggcgccatcgacgagagggagtacagggtgctgtaccacacggcgcgccccggctgccgctactgggtcttctccctgagcttcttcccggaccagccgccgagggacatcgggcgccccgccgacctggaggccgtccgcgccgtgctcgccgaggggatctccccttcctacgagatgccgcccgtcgccatcgcgcacaggctgcactggcgcgcgcaggcggccagcctcaacgtgctggtgttcgacacggtcgccgagtccttcgggtggatacctcccccgaatcaacaggaaggtaatcagatgatcccggtggagggagaccagctgcttgagatcaacgggaggctcgccatgacgctcgtctcgcagaccaccgtggatgtctgggttcttcaggaaggggaggcttgggaacaccattaccagatctcgctgccggtggatctgctcaacgttttcggtggctacgacgacgaaggcttcgtatccgcagcagtgttcgccgtgtcccaggagaggaatgtgctggcacagtgcccggcgatgatgctccagtgcgacaccgaggggaacgtgctcatgttttactccctcgccggccacctcaccgtcctgtccagatatatgctccaggaaagccttcttgcgcatgcgttccttccgatgcggcaggaagatgcaatcgacggcgacccgccgttcttccaaggtccgtaatctgctagatagcaaccaggttttgcaatctgctgaatctatgctttagatgtgtgttcaagtttccgtagatgtagaagaagcttgaaattgcctgtggcaatcaattcgacagaattggtttgttgctgttgctaagtcatttggacattttgtatttagtagcaagcatgctggttgggattcatgttgatacagatgctctctgttaatttctgaattttcagttggactgaaatactgaatgaaaaagctaaccactgttcaccacaatatatagtgttgcatcctttgttgtttgtcttgtttgtttatcataatctgcacaacagcacaagtacataggcagaagctactagttatttcaggcttctgccatgctgactgagtttaccaattagtatgaaatgtatgcttcatgaaatttgcagtgatttatcagttgcatagcacatgatacgtgtgctttgaaaattgtcaagcccaagctttagttgtgtgttccaggaaagtagtatcaaattttgatttgattattagtctgcacgttcaatgcctgaaatatgtaaaccaaagaattgaaaaatgattggcatgatagctctattttattgtcaggcagtcctgttgtactcaattctgaaaccatgttgcgatattgacagtgcacatttaggaatgaataggcatattaatcttcctcagttagtatttgtttactgatttttgttcctagatgctacagtgtttgaaccaactgcatggtttctatgtttgaacacgtgtaaggcatatctccagctccacatagctatattagtagtgcatttgtaatgaattggcaatttcaaatttggacttccacagtttctaatttctggttaatcattatgattatgtgggttctgtttgatttactcccattgtatgagaaatgcatgataatatgattctcaaagttgatcatgcaaatagcttatccaaatggatggtgcgtgcatttgacttcaggtcacagagcagtgatataattctggtagtactttttcgccctttatttctcatgttcttgggtttgcggtgattgttttcacctggtgcagacaattgatactctacatcaatgcttgaaatatgagaaccgaaaatttgaaaaagattggcatggcagtttcatttcgttgttaggcagtctgactgctgtagttaactctgcaaacaatctgttgatactgaaaacaatgtggaaagaataaaaaagtgttacctaatctttgccagctaattgtttactactagatgttacagtatttgtgaacctactacatgatttccatgttttaaaacatttagggagtatctccagctccacatatctatatttgtcgtgcatttgtaatgaataggtaatatttcaaatttggattcccataatttctgatttcaggttgttagtactggtaatccttttggtggttctggtaaggtttttaacactatgttccatcatccatggttgtatctctggatcttactctcttgatttaggtttcaaaagattttgcatgactggaaacgatagttcgtcagtatgtgagttcagtttattgctgccgctttatgtgaaatggtaatatggtcctctaagttgatcatgtaaagagcttacgcaaatggatgcatttatacactttgtagtccaaacataagtggaaattctgtagttcttagaatttacgcgcaatacaagtttgctaagtccaagttgatcatcataatacatactggaattttcttttgacgctttatactggtagcttctttcaagtgccttttctcccgttcctttcaaaaaaaaaaaagtgccttttctccccataagcatccaaatacttcatcaacttgaagtactgaactagtattaatacattagtgaagatttcttattaatgctctgatgtgttccaatctagtttgcaagtttaccggtagaagtttaacctagatgataccgtattctagttattgctttattggggatctgtcttctgtgcaaatgaaaaaaaaaaaatcagagcggaacgataattttatctgttcaatcaattcacgctgaaaacctttaagatatgcacattgaggacttttgcataaaccatgttatgtactacagcacgttgaaattttgttttgtttgttgcaaagagacaatggatcaaccgcataattgttgcagtaatcgcaagaaacgatactgtacaggaaccggcaagacggcctaagcagaaagagcagagaaaacaccattgcaggaagttaaaaaaaatatagcagggtttcttctcttcataaatacacccaacccacaagattatccatccgtacagctgacagtattacacagaataatccaacaatttcaacgtatatatacaggagtttccggcaaattaccatcttgttgctactcttttgtcatctgattgtcacctatactatacatatgtcactataaaatcattggtacatcaaaactgtataatcatgtaaaatgatgcatttttggtacatcaaaactgcacagtcatgtaaaatgcatacttggttttggttgtatactaacatatctcaatttaccaggacaaaacaacaggttagctcctacataccagtaaacataactatactttcttagctaaagttcgttgtttcgtgccatactcgacaattttctcttcaacgtgcagtccctttcttcgcctcacagaattcatgagcttcgttgccaggtttgggccaatgtttgagccatctccgaattcttcaatctcctcgcgagttttcggaacaaagaagggatcctgaggaacagtctcccagtgactgaaggccagaagcgcgctggctgcacctgcagttgcattcctgagcttcttagagaattcagagctctcggcaactgacaaatacgcatgcaccgtgaacaatgaggttccctcctgcatctcttccttcagcaccctcgcccgacaattgccaagaacagcatacatggaacctaactgctcagtaggtgtggtcagttcgcagaagtacattggctccacaagccttggtttgctctcaaggatggctgcctggcatgcttctcggaccgctgtaatgatctgaccactgaaggtgctgtaatggtcagattgattattgctagcatctgcactatccggaagtatgtaaggtttaacaaggaatatcaagccccaagtaggttcaccacataatggtcctgcattggttgcaagctgaaatcctgttgcaatgctgttcttcactgtttcaggatcaagaccatctactgctgattgactgccgtcgatgccaattgtagtttttgcatcagaagaattcacaagccctaacctctcagaaacatggcatgtaccgcgcacgagaataccttctcttccatcttggctggtcaccacaccatcgcttgatgttgcatcaggtgagaggaggagatttggtccaacttgcagaggaccaagtgcccagattctctgaaggtacccaatcaacatctttctgtaactctctgtcttttcatcatccaactgagcagagagcgcttcgagatcactgtctatggcattgatgaggagctgcctaagtgttgatgcagaatcaccgccatcctgcgaaaaccgtgaatccaacacaccattactatttcctgaatccccctcgattacttgagcaagcaattctttgctatcctcaatgaccttagtgacagcattgggaagcctgaagaccttaactctgacagtgaatctcccatttggagtagtcctctcaacaaattcatgtgaagctttcaggctctccattataccggcaccttctccttggatggtgtccttgaacgacaccaatggcttggacacctccagctggactcttgcaaacctctcctgcagattcttgatgcaatgctccaaatgtatctcgccagctgcagcgaggacatgctcgccgcgttccgagacggtgtactcgatgaacgggtcagcctggttgagaagcttgagccccttgacaagggcgcccaaatctgacggattggagggctcaattgcgaccttgagcatcggggacacctggaacatcatgcccgagaacggctggcagttcttggtcgacgacagcgtggcgttcttcagcacgtgatgcccgagcccttcgatcgcgagcacgtcgccggcgcgcacggcggagacgatctccaggtcaggccccatcatctggtacaggtgctgcagctccacctcctgcagatgcttctgctgcattgcgtcgtcccctcctctcagtggatcatacatgggggacaggacgaacaccttgtggccagcacggaggacgccgctgaacaccctcgcgaacgccaagaaacactcccctgattcggcgctggatgatgatcccctgtggttcaggggctcgccattgacgcccctggatggcaggaacctgtatggcacggcgaacatcttggacacgaacaccaccaccggcgcgctggtgctcgcgttgcacgtcgccacgcacctcctcaccttctccacctccgcggcgacagcggcggggcacggcgcggccgccgttagctgctccgtcttggcggccggcatgagccttgccaccctggtggcctgcgcggcgatggggttgggagtgcactccacgaccatgtcgaacaccgcctccgcgagccgcagcttccgcttcatcttgtggtactgaccccagagcggctcgaggacgtacttgacgaacatcggcttcgggttcgggttggccgtcgccgccgccatggcctccttccccaccaccgtcctgctcctctcgtcgaagtacttctgcccccataggcctttgagaagctccgcggggtcggctctgagcttgggggctagtagcttggccagcgtgacgaggcggaagccccagccctcgcgcgcgcaggcgaagacgacgttgccgttctgcggctggaacgcgtcctcctcctcgtcggcggcgtcgccgttgtcggggagttcttgcgagagggcgcaggcggcgtcgagggtggagaagtaggagcgcgagcgcagcgcggagtagatggagttgacctcggacacgatgcggcggaggcgcgcgtgcgcctcggcgggggtgaggcggagctcggcgacgaggcggtccaccttgttgaggacgaggcaggggcggaggcgctcgacgaacgcctggcgcagcgcggcgtgggtctggacccggaccccctcggcggcgtcgacgaggacgagcgccgagtcggcgagccgcgcggcggcggagacctcggagcagaagtcgatgtggcccggggagtcgatcaggtggacgcggtggccgccgccgtcctccccgccgcggcggagcgcgatcgaggccgacttcatggtgatggcccgccgctgctcctcctccaggtggtccatcacgcgggcgctcccggccatcctctcgctcacccggcgctcgctgccgtacgccgcgatgaggtggtcggccaggctggtcttgccgtggtcgacgtgcgccaagatgcaggtgttgcgcacgcgccgtggccctctcccctccgccgccgccgccgccgccgccattggattagttttggccggtttcgtctacgtcggcggggctctccggcgtacggatatacggatggatagtagtagtctgggcctcgggggaatccgactcgtacacggtacacggcccatgggccagcccaagttgggaacccgtcgccgtttatatctcaaaagaaaaaaaagaaaaaagaaaaaagaaaaaaaagaaacctagttcgtcaccgtcaccgacgccgggaaggaggaggaagcggggagatggcggcggcggcggcggcgcggctgccgcggacggaggccagggtgctgtcggggcacgagggggcggtgctggcggtgcgattcaatcgggacgggaactactgcctgagctgcggcaaggaccggatcatccgcctctggaacccccacaccggcgccctcgtcaagccctacaagtcccacggccgcgaggtccgcgacgtgaactcctcctcgtaagccacttcgcttcctcttcctcgctgcgattccgtccccccaacaccaacttcccctgtctgatttggaggagctgagcaccagtggggaatttgaggatcctttgcttgcagggacaatgccaagctggtgtcgtgcggcggggacaggcaggtcttctactgggatgtcgcatctgcccgtgtcatccgcaagttccgcggccacaacagcgaggtatggaccccaattctcactgtgatgatgaccgcgctgttgtaattgtttggtgatcgcggttggattgagcaagtgagaagtgctcatgaaaaattgtactattaagcagtttcagcaccatactatcagtgtgttaagcgccgctgctatttcaatactagtattgattttatctatacagagagagcacggttgtttatgataggattagcagtagcctgagattgtagtggaatagagcagttggcactgtttataatcaaacaacgtctgttccattgtgctatgtggagaacaccacgaaatcagcactctagcattatcgatctagtcacaactagtcaattgcagggtgaattgtgtgaaaatgagtgtgctgtaatgatacctctgtaatggtgttgttgtacttccttttaaatctagcactgcacatcgtcaatatgattattgggatactgaaaacagatcaagaacaacctcggtgacaggtttttgatccttgataatattgcttacatacctcaattctgtcttccatagatcaattcagtgaagtttaatgagtttaacacagttgtagtctcagctggctatgatcgcacagtgcgtgcatttgattgcagatcacagagcagtgaccctattcaggtattcttattattgttgaagaacatggacccattgattttagtagtattatttcccctttgtttctcatatacttgggtaactgggtttctggtgatttttttcacttggtgcagacaattgatacttttcaagatagtgtaatgtcagttaatttaaccaacacagaaataattgctggcagtgttgatggtactatccgcacatttgacattcgcatgggtaggtaagtacttttcttatttcacaatcaatattcaaccaattctcatttgttatcttagctttcctaaatggaactttgggtgcttctctttttgaatagaagtattcagatgcttatccatgcttcaacagattatccactgtgtctgatgcttctgttaccctcttgctgataacagggagactgtcgacaacttggggcatcctgtcaactgtatatctttgtcaaatgaccgcaattgcctattagctaattgtttggattctactgtgaggcttctagacaagtaagtattctctgcaagctgactttatacttcaacatcggcagtccctcctctatttcaagagtgacaaaacaacacccttctgtcaatttttaatttggaagacgacataacagcattttctgctaacactaatttcacatattagttacttttctcaccagttagggagctcactccattcctttactggataacatgctgtttcccttattaaattagtcaatccgtgggggctttcttgctcggctctgatacaacagtgatctcatctgccatcttcctcttaaacatgctagcaaaatttgctttccaagagcaagtagaatgagtccaacaactatattttgcatctgtgctgaacattgttggtgttgttgcctgtggagctacttcatttttgcatctgcagtttcctttaaagaaacaatttgggagtttgtattgcaaaatctggttagacactacttttgttttgtggaaaagaaagcttcaagttaacttgtgttatggaactgtttacctttttaatgtcaaatggaccactgtccttggtctttgcaacaaatgtcaagccaagtgaagttaatgtgccattgttgtgccacaccatgtattagtgaacaaatccataccaacagcatggtttaggagccatagtttgcttgtggtccacgtgacctggctactttggatgattttgttgtgcacttgtgcttaactacttacagtgtctgcattatgattgtctgtctgtcattcataggttagacctgcttctgttatagtacaatatggaatgtaagaggttatggttgttttgttttttgaagggagaggctatggttgtaaagggtggttttttctatcctttaattatttcctagcaagtccttagagtgcatcactaactttaatgccgtggacttgtggtacatgctgccacaaaattcaactctgactcagaccaaaagaaaaaaaaaactctaccatgtttccattatgaaaactgactgaacaggggatgttgtgactctgaccatgttattttgtagaattcgtgggtgttgtttttacaaaatgctatgtggagggccctaacccactgcaagtgcaccttcatcattaaattgtttcttttggtgattgatccatttatcttttgttgcattgattaggtccactggggaactgttacaagagtacaaagggcatatatgcaaggtatctctcaaataagcttccattgcattggtgattctgtagtcataatttctggattttcatatgtacattaccagtctgttcaactttttcttgcaattaatgttcgtgaatgaaatacttaagcgagatcaaaactatgcatctcatcattatcagtttttaaaacttttaactttcatatttccagtccttcaagatggattgctgcctaaccaacgatgatgcatttgttgttggtggatccgaggatggttacattttcttctgggagttagtggatgcacctgttgtttcaagctttcgagctcatagttctgtggtatttccttgttttgcttaaatctggccaaaccattattactgattaaatgacattttctcttgttttctgtcatttttgcttttaaccatgtcatatactatatatatatatttttcttatggcaggtcactagcgtcagttatcacccaacaagggcttgcatgctaacttcatctgttgatggcaccattcgtgtttggacctaaaagtgggaattgctgttgtgctggactcatatcctgacaacattgcttatgtggcattattctccaattcatctatttttgaagcagagaggattgaaaaggatagatgttcgcaagttcaaccctaactggaaccaaggagctgggtgttaagataagattgtgctacttggcagtagttctggacacggtcaaggcagcaatttgctagtgaggatgaactatatccaccaagctaagtcttctgcgcagcaagctccgacatgtgaaatacagtctgccgatgtaccatggccattacagctagttcaatcgtgagaactggaccagtcgaactgagtatccgtttggaactttacgatctggaacgagtgtacccatttgttactacggtcacctacgggtaatttttaacctgagattgatgatgatataatacggctcttttggtcataaataacttagttcttttcctctaaaaaaaatttaacttagttcttttcgtattgtcgatgacgtcttcaaaattgcttcccataatcttcaaccgacaagtcgtcttgcttgaaatactgaagagagccaagatttacctcaattggcaaaacggcaatttcaacaatgttttattactcgactcggcttatccattagcctgagcgtagtaaagagaagaattcaacaacttaatatcataagatttggcaaaacttctcacttctttggacataaaagaagctcctttagcgtttgaggaataccgaatctatgaacaatatactccaaaataaagtcaattacctccgcacaagtaatattctcgagcggcacggcttcggcccacttagtgaagtaatccattgctactagcacgaaccaatacccttttgataacgaaggataaatttgaccaatgaaatccaaagcccaatctcggaacggccatagtttaatgataggattcaacacagcggtacccgctaattgaacattgccgatccgttatcaagcttcattccctctatagcatttgaaacaatcatcaattattttcggccaatgaaaccccactctcctaagcaaccaatttatcttacgggccgattgatgaattccacaaatctcttcatgtactactctcctagcaactttagattgatcattatctaagtacttcaacaatacttcatctatttttcggcgatataatatttgaacgcttgccgtcgaatctcccgatcaaccttaagtgtaggatctttcaaatatctaatcaaaggaattctccaagctatttctacctcatgggcacaaacgtccgaattcacaattaattcggccttttaatcaatcgtaacgtgcccccagcctcctgtctgggatcggtcagaccagccacgcaatgccggtcagaccgccctgtctgcacggtcagaccggccatgcaaagccggtcagaccgccggtaccaccggtcagaccagccatgcaatgccagtcagaccgcccctggtctatggttttaccaatttcgtccaaagttttgaaatcaagcatcggccttcagtatataatttttcttcacataatagccagatgcttggtgtatcaaattattggaccaaaatttcttctctctagacatataaaaaactataacatccaactaacatatctagatgaatactaattcaaatggcttttgaaacaataatcatcatggcatcaaaacacttagccaattgaagtatgatcaataatgaatcaccaaagtcatatgcctcacacacatgaattccaataaactacaaatgtaaataatcggcttgagcatgtatgcaaaatattaacaatgccaatgtttctaaagaaaacaactgtagaataaatcatcacattgaccattgacattagccgaattactaataagcaaaactttcatggtgcaataaatatgaaatctatatcttatatagtgatccataaaaacacatacgatttggctttaaataaatatcaaagagtcacgagccaaatcatacttgaaacaaattatatgccaacctactaattctactacttagaactggcatttgcaacatgtatgtataatatcaatttgataagcaaaaacacacatgtgctagatagcaagcaatgttctaacatgacataggcatataatataacgatgaacaccataaacccataccttgccttagcatccaacgaacggcggctcgaagatgtgatgttgtatccattgccattcttcttctcttggttccctcatgagcatattaatgtcttgccccccaagcaaaatcggctttcttgattgcacgatttcgaaggcaagatgaataccgcactaacacccatagcatcatgtgaaggagacttatctttaatgaccgatgattcttctctcaccaaattgaatccatcactactctgtgaaagcaccgatcttttaacttttacttctttaggcctacacactcgcttaggtgtcattcgaggctctaaattattacatgttttgttctccacatcttcggcctctttttcttttttacctatggcccgaagacgttgtagcctcttcttttgagagcgagataagccagaaggtatccacttcggctgtggttgttttccaggagctaaataatgattcttaatatttttggtcgaaatagaagctcctgtgttgctctcgattttcccgctcacctttaatgccccttggtctgatcggcctctgggcccggtcaaaccggttgcaagccgtcggtcagaccggccaggagggtcggtcagactggctgtagacaggcggttagatcggccagctgtctcggttagaccgccaatgttgacagttatggcgtcagcttcgatgtcctttgcttgcatggtttccacggcatctccagtaggtacatgaacatcttgagactcctccttgacaacaacgacctccggagctttggcttcttttctcacccacaccttcttcacctttttcaccttttgtcgcgaccgagaaaattaccttttcccgaacgctactgtattaatccccgtcccaggaaaagccggggtacaccaaacaaacatgatacaaaaggcacatctttattatatcgattatatttacattattacaaaggcactttaggcctgacaatcaaaaataaacagcagcggactagcgggcctacggctccatcttcacaggcgctcaactgggatataagccaggactccacctaagacttcttctccaaagcttctcttactgaaggggggaaagattgagtaagaatgagtacaaccaccgtactcagcaagtcacaccgggagatgcatgattaatgcaagggagtacaaggggtaataatataggggttaagttttgcagtaaacagcatttaaaagtcacttagttgcccaaagctattttgtaaacacgatcctagagctatacaatattattaatcaaggccgtggacccacacgaacctgccttaacccaaggcctacgatgattcagaccgaactggcaacccgaccctgggtcccagctcgtcccaagccaacccaggccaaccattccacattttagttattaagcaggttttaagaatttaaaacactaagttgggtatattgctaggcttgcccataaccgagggcgcggctattcgaatagattatactctgatcagatgtgtacatctttacccacaagacacatcttcctcacgtgtaaccacgtgccacataccaccacggcatacggacgaaagacgtgacatagttcccaacccatcctagccatagacaagagtaccgacccaaccccacctacggccggaacctccgggacaggtaggcaggactgagcccctggcagcaggacaccagccctgtgccatgacatctcgactaccgggccgcagctcgtgtagccttcatttgtcctagagatgtccttcggcccccgacttcgtccatctccatccgtgtacttttgtttataaccagactgagccacaaactaagccttacctaatgtctagagttataaaaccacataatgttgcctaattaatcaacgaagcatctacctaaattcatattagtggaaccatgaatagagtacccattagttggggttttatttattctagggtgaacaaggtaataataacaatagcaataataatgtcataacaaaggtaaataggcatggctaaataaaacagtgataacgcgggaatttaaataaagcgataatgcattaatttaaatcaaaataattttataaactgggattcaatatgctcaaggatgatgtgacttgccttgctcagagagaacggccttccgaaccttcggcgacgaccgcgaaccacgcttcgggaacctccggaacgacagaagctacgcgaagcacacaagcaaagctacaagcctataaagaagcaataacaatacataaaaagaaagcacagggttctttaggttataacaaacattaggagacttgaacgggtcgattcgaggttcgtatgatcaagatatgatcatccgaagtttaatgctgttatatggagatttgcggattattataattaggttttgcaactataaaacatgtgtaagcgctagcctggaaaagacaggaaggctgcgccgttgacatgcggaccccacatgtcaacctaaaggaccgcggtagaccgagtacacagagacggtccacgggtcgacggaagcggaccccgtgtgtcaaccgaggcgagtggccgacaaacggactccactagacaccacacgggctgcacacgtggaaaccacgcggctaccgagcgggcacactaacacggacactacacggtcaccacccgcacacgtgaacgactaccgacaccggtacgcgggtaccggggtcgacaaccgcacaacgggcacgggcgacaccgaaaggacgaggacggggcagcgaaaggagagatccttaccaccacgcgacgaggcgtgggaacgacaacgacgaacgagcgcggcggagacggctcggggacgacggaggcgaacggcgagggaacgacttcggcggcgatccttggacgaagtcgagacgcggccggcacgaggcttgacgacgcggagccgaggacgaagacgacgacggggctgccgcggctcgcttgacggacacggacgacggacgagaacggctcgacggagggacgaacgccacgacaaccgggaacgacgagaggacgacgacgacgacgaccggggcgggcgaggaggcgacgagggcagccggtagcggctgcacggagacgaggacggcgtggagacgaggcttgggccgggcggccggcccaggaggagaggagggagaggtggcccggggagagagggaggaggagggagtgggccggggaaggagggagggcggcccaagggagagagggggaaggaaaaagagagggaggagggaaggactttgggctgggctcggcccaaaggaggaaggaggatttatttttagtttttctttttagtaaactttgataattgtttttgttgcttaataaatatttccggtgctctgaaaattcaagtaaaatttgagggctcattttagaccaaggagaatttaacaaaaattctccgggccacattcgaatttttcttgtatgtattttagtgtttgccaatttcttttcgaattttaattaattctattatttcttttagaaaataaattttatttcgggatgaatttatcaggacgtgacacctttgatccaccggaccgattcttttcgtgggaaacggtcttgtcttgagttaaaatgagttggtaccgtcctaggtgattgcttccatccttgatgacacggcataggtggttgaggcatccatggcatataatacataaaaggataaccatatagtgacattggatatggataccatggcatcacaaccggaggtttatatggagttggtatagttgatggctccgattgctttgatgtttgaccaaatctcttcctacgagatgatcttggtcttttcgaatcactagtttggttatcaaaacgttgaccggctaatcctttcttgtacttagccataagcatctcaaaagtgagtttcggctttttagtcttttgggaactagatgagtcatcttttgtaactttatgatcttcggccttcgcattttttgtcctattcttgggccgaggatccccaataataacacatttccctttctttttgccaacatcaatagaactaacagggagatgatcactaacgattccggtcttaggcatagatgtaaccgaaatagtttcacaagtgaccgatgaagtatcaatcggtctttgctccatcaagcttgcatctttgaaataaccatgaaactcatgctccatttgtgaccatgtagaaattgaattaggagcaagtaaactataccatgtagatgcaaagtttgacaacgaaagaggaaacaattttaacttaagcaaatcatcattactggccttaccacattgatcaataaattggccgatatgctccattgttgttctagcatcctcacatatgaatttcgtgaagttgggcacctcaaatccttgcggatatgagatcgaatctacgtgctcaggatacggcatttgatatgtatgcatagctacattggattttatttcactactatcccgcaagacattatcatcatcttttccaacatccacatgactgatttgtgattcggtcttaggtgataatgctatttcactttcacttgtgatgcaatccgaaccgtcatttagttcggctatatcttcaatgatgctattgtccaagctagcaacacaatccgaaccaccacttggttcggctattccatcattgtctaaactagtaacacaatccgaaccaacacttggttcggctataatggttattgcataatcatccaagctagtaagacaatccgaaccaacacttggttcggctataatcgttatggcatcattgcacaaattattaacacaatccgaatcatcgcttggttcggctatacatgatattgcactatcatctaaactagcatttaagctattgtcatccactcggctttcctgagccagagcttcatgcaacacatgatcaacatcaagaaatatttggccattcaatttctctttattagaatcaagcaatccatcatatgcaatgttggccaaatctttatcagttattttcaaactaaaacatcggattttaatatctctaaaccttttaatataatcagcaacagattcattgtatttatgcctaaccgatgttaaatcagacaacttaaactcagcttcattagtgtaaaaataatcatgaaatttttgttctaattgagcccaagtactaatagaatttgccagtaaagaagtaaaccatataaaagcagtaccggacaaagataaagaaaacaagcgcaatttaaaagtatcactattagcctcaccacattgcgctaaaaattgacctacaagctcccatgtggtcctactatcctcaccactaaatttggtaaattcgggaattctgtaaccacgaggatatagtacattatcataataatcaggatacggcctttggtaaaccttagcacgattcctagttttaatcccgaatttatccctaataatcccactaattatttcctccatattatcaggcctatgttgatttggtggtggatttggtggcctaataggttgtgtttgcggcgcaatatggttatattggccttgcctagtatcgggaggatacccctagcaacatcattataagcattagaaacatgtgggggaacttggggattagttgcagcagtagatacaggaggatcaaatgttctaagatgatacaaataactagcattggtcattggatctatcccctgaatcggtatgattgcgccggtctgaccggtccagagcctggtctgaccgacatccagaggcgcggtcggaccggcctgagtcccgatctgactgccggggtaatacccggtcagaccggccgtttggccggttggaccgacggcgaagtcgcggtctgaccggccatcaggcctggtcggaccgtctatatgcgccgctccatcggttccactgcttgtttgatctataggagcttggctagcagtggtagaggctttatctttacaaataaaatcggccaagagagggccaactttaaatcttaaaatctcatcaaatttacctccaaaagttgcatctaatctatctttaaaaacaatcatggatgaatctattgtagatgctacttgttgttggatagattgtgttacctctccattgcgtaccaaatcgggagcgagcttaggaagtggcccgggcttaatgatcacaccttgacgagtcctagtgcacgcccttatcaacgcctcctgtgtgatctccttgatatactcctacatggacttgcggtcttctccttcgaaatcatccaatgagatcggcatgatctcgttcccgctcatcatggttgatgaagaaattccttgattaattccagccatatagctcatagccgaaatatttgaccgaataaattaatatccggtcttgatttttcctttgaatataacaagcgtgtgtgcaagtaaaacagaattgcttctgtctcctcgtgtgtaagcaaaaattcagaaaatcgatctcacaataacagccgaaacaatatgaatcggctttgatttttttttaattctcctcagtagatgtgctaatgtatgtactaacagattgatgttgcttctgctgcttgtgacccggtagatcggctctaggagcctgatctttttctctgttgccgtgtgaaacaaaaaggaaacgttgccaagccgtctgctgcttcctgataatgattttcgatacacacgacatggcaagtgcttatatgaatttgatgaacgaccaaatagcttcgccgccgaatagattaatccagcgataagaacagtgcagcgactaattaaggtatagattaatttcggccgtttggccgaaacaaactattcgacgagacgactagattaaacgaaattcggccgtgatatggccgattagatcgttccccagcggagtcgctaaaaatcgtgttgccaacttttttgacaagtcgacaagcatgatcgcaacacctaaacgccttgcggtggtatggagtcgctaaccacctcaatctagctaaacggccaaatcaagatgggttttgaggaaaaacagctaaaccggctagtggagccgatttagagatcaaaatcagcctctaggccgatttagatcgatatgaggataactacccgtctcgtgggcaaaatggaaggttttcaggacaaacctacaaagaggtgtcgcactctcgcagcggcggcagacggtttacggcgcaaaccgataaagatggactaaactagggtaaaatagaaaaacatagtaaaagaacgattcaagtaaattgtattaggggttttacaataaaccggccttttcccttaaatgagggttggtcttgccctttacaagcccttctccacatccaactcgggatagaaaccaatagaaacacgaaacatgccttcccaagcaaggaaacccgagacccgacgaaaacagactcggactcggaccctgacagtctgaccgcccacatacctgcggtcagaccggccctactagccggtcagaccgcccatatacctgcggtctgaccggccctgcgaaggaaacccggtactttccaaactttgacaattttcccctatttcgtccataggtgtcaaatttgggtgtaaacaatgcctattaaaactagatggagggagtactatattagaagtcaagcaactctaattgagctactactccattattgtgagcttaattaagcgtggttatctataccacatgagtgacaggaaagctctgatagtcgtggtgcctgtgcacacgcacgccggcgtgcgtgatcattgcccagatgtgggtgatgaactcgccgccgttggccagcgccagcgcgtgcccctccggacccgccgacggcctctgcgcgacgacgacgagcaacgccgcccagaactcgagaagcatcgtccacacctcctcgaagccctcggtcgactcggaggcgcggtcctcgagcagcttcccgagcttgacccccctggccatggcggacggcgcctccgcctcccagtcgtcgccgaaccgcaccagcttctcccgccggcccgcggtggcgcagctgcagctacggaagaagctgccgaggcccgacttcacgtcgttgtacgccttctccgtccactccgggtcgtcgggaagcagcccgggctcgtaggataccaggtaggcgcagtacctcgacagcgtcaccgccgcctcgcccttgcgcggcagcggctcgccgtcgcagcgggcctcgagcagcgccgtggcgaggtgccacgccaggatcaccgtggcggcgcccttgctgctgtcgcacgcccactcgggcccgtggtggaagaacccgtgcctgcgcaggacggccacgcagctggtgaactggaggtcgccgccgtcgccgccgtcgctctcgaggaaggccttgagggccgcgacgatggccaccttggcctcggcggtgacgacggcggggcggaggccggcgaggcggcgcgagaggatgcgcgacgcgagcatccacacgcggcgcgggtgcagctggtggagcttgagcatggtgacctggtgcgccttgatgacggggcgcgaccggtgcctcacccagaggccgctccggatggcgcgctgggcgtggcgctgctgcgccgcctgcctgcgctggtggtcgcggttgatccgcatccgggcgtagttgcagagcatggaggcggcgaaccagtcggagagcaggtacagcgcgagctcgtaggtctcgacggagaagagggtgagcgtgaggaggaaggtgacgatgaggtcggaggaggagcacaccatgccgacgagcgccgacacctggtggcggaagcacctgaactgcaccaccgtgtcgatggagatgccgatgaatccccggaacagggagcccagcaccctgaacatgttgccgttgccggtgacgagcagcacggcgatgcagtagaggaggatgaagacgacggagaaggcgaagttggcgatgaagatccccggcttcggcagcgccagcgggatgatcgcctggtagtactccaccaagaacctcagctccatctccaccacgtcgaacgccctctcggcgtcggcggcctcgccgccccggtcgccgccgccgagggcgaggaggcccctgaggacgaacgcccgcgcctccggtgtgcctctctccgccatgtggcaccgctctatcctccgccggagcagcttgtagagcgctatgcccaggcagatgtcctccagcttctgcctcctccgcacgttgtacttgaacagcgggtcgctctcggcgagcttccagatggtgctcactcggaccagctgctcctccgtcttgccattgccatcgccatcgccgctcgtcccgccggcggcgaggatgtcctcgaggccgtcgatctcgaagccgtgcggcgtccggttgatcttgagctcgctctcacccatcaccgtgtagttgcatgctctcatggtgcggttgccgcggacgtcgcctccgtcgtcgacaacctgcaggtccagctggcggtgctccccgacgagctgcgccatgtagccggagacgagcgtggcgttcttggcgaggtcgaaggagcccttggcgaggtggatgcaggcggcgcgcttgcagagcttggcgacgctgaagatccagaggatgacgaacagggacttgacggcgaagccgtgtacgtaggagtagacgaggtagccgatccagatcatgcgggcggcgtcctcgacggcgtcgaagaggctgtacctgccgacgccgcgggagaaggcgtcgccggcgggggcgaccatggcgaagaccttcttgcggaggagctcgacgaggagcatccagaggaggatgaggtaggcgcggaaggggaggtccctgcccttggcctgggagaacatgaaggacatgaaggggaggaagagcgcgaaggaggccctgaagaagatgcgcgtcgccgacgagtggcccctgtgcctgccggagaagcggccgaggacgccgacggcgaacagcgccgcgccgaggaaggtcatgagcaccgtcgtcgtcaccatgaacttctccgtcgtgcgcaggtcgggcgacaccgcgaacgtcgccaccagcatcggccccggcgtcgtgcacaccgtcttgttgttgatgacgatgtcccgcatcactacccacctcccctcgccgccgccgccgcctctcgagtagtgctccatctctcttgcagtagtgtcttgccaatgcatgcagagcgcagtatttgtaggcggctcgatcgtatcgtatgcatgcgtaccggagagcttgtcaggacagggtggtgaagaaattaggcggtgtttaagatcaggggttgaaagtttttcatgtcacatcggatatacggacacacattttaaatgtattaaatatagactaataataaaataaattatatattttgcatgtaaattctgagatgaatttattaagcttaattaatccagtcattattagcaaatgtttagtaccacattatcaaatcatgtagcaactggacttaaaagatttgtttcgtaatttacacgcaatatgtataattaattttttttatatttaatactataatcatatccaaacattcgatgtgacggggtgaaaagtttttgcatggaaagaccttaaaatactttgctcgcaagagaaacaatgctgtgcgcgctgaggggtgggagcatatatgcgatcgatcgacaggggtgaaatctagtgaaaagctgtgtcgggtcgagaggctgctgaacattaacgtacctagctagccggcacacgcaacgtgccaagaatcgaatcggtccttcttcttcctgcgatcactgcgtgcagccagccatgcattcaggagtgtgtgcgtcaatggcacgtgttctaagcgagcgggcagggtatatgaataatctttcaactagctagctgtttcacactttcactaatcactcggtggagagaaaaactcttgtccttaatgacagcaaaatatggattacatagtatagaatgggttgtgaactagcagaaggtgagagcacactagtacacacaagatttttccaaacggtcaaaatgcatttttccgtgcagaggtccggtccatctgcacccatgtgtcaacgaaaatccatattttcgcgtgcgggtggccaaccgcacgggataattcatcttcccatgcggtccgattaaggggaccgcacaccgcatgggataatcaattatcctgtgcggtcaaattataccgtcctcacacaaaaaaaatgaaaaaaaatcgaaaaccctaaccctaaccctagaatcgcccgacgccgctgctcgtggtcgccaatgtcctcgtgttgtcgccttggtcgcgccgccaccgccgcttctgagcccgccgctcccggccaccaccgccgctcccgagcccgcctatctcgacagccgctgctcctgagcccgcctccgtcgcaactggccgccatcaccactcccgggctcctcctcctcctcgttgtcggcgcgacgtggatccggccagtcgcccgccgcgccgcctccgccagtatccgctcgctcccggccatcgcctcgtcggtggcagcggtggcgagccgggcgcctgccgcgtcctgtgcgctcggtgggaaggggaggagctagaggagaggagaggaaagggagagagagggaggagtgattgagggagaataaaagggaaaagaaagagagaagatgaaaattttgaagtgagtgagagggaaaagaggaagaggtatttttgtgtgcggtccacttaagaggcccgcacgtgaggcttatttttgtgcgcggaccgttaagagtcccgcatgcgaaaatcaatttttgcgtacgggcctcttaaaggtccgcacgcgaaaataggaggccaatttttgcagacgcacacgaaaacggttcgtctgggaaaatgggagctccttgtttaggaaaatcttttgtgtaccaatagcaccgagtagcacactatgcaccaacccctgacaaatatgagtaaattgaaggcaaatgggtacaaatacaatttatgtcatgtgaggagtgaaatggcacatatcaacaattataaggcctataaatctgcgatgataaatagcagtatactacagcgtgggagagcttgagataaccaatcagaccccatgaaaggagctgtatatagctgacattgttatacaacctcgagttgtctcagtctcagatagcagaacatacgatttctctaggtgatgtagggaaacatatatatacgatgtcttcggtttgcctattccccgatcagatgagtataaatagtcggtgggtttgggaaacaccaggagttcatgccccacaattggtcttgagttgacagtagtcaactcacacctcaacgcatctacagcacaacattcttaagtttgagttgcatttaacccctaactagaatttgcacatcccatacataccgacgttcgtggttcgatcgctgcaattttagaaaaggtccacgggcaaaaaaaaaacacatttttcatttgttgtcgttctgctaatcatatagaatctctagctaagaccgaagttggaacttattttattttctggaaaatcattggctgggttctttttaattgatggggatttggactgtgggattgagagtactcgggaaatagttagtgtcggggttgcttgttcattgattcagagtatatctttctacatacaagacaagctaaatcagtacattttgtctttgccttgcaaaccaacgagagcctaagcacttgacaagtgatctctacagcatgctggatatccagggttggaaattcaggaacgaaatttttgaaatttcggtcattttggacccctccggtacgatattatttcggtcggaattttttaatttttttcgtgaattttagtaatatttgttaaaattcaactaaattttgttcaaaattttggaaatttttggaccgatccaggatatccaaggcttcttagcagtccgtgctgccatcctcatcagctgaaagctccgcagggtatcaaaacaggtcattttaattgtacgaaggcgacttattttgagtatcactgtaatcaacagtttgcagcacagcagcagcctttgtcaaattatttgagtgtatacgaaggtttcttttcatcgagaatgtatcaagtttttctggtgtaattgttggtgcctctccatagtccgtaccttcttaatgtcagggtaccaggaataattccaaagttactaaaataagcacggaaaagcattgtagttttttatcccttcaaaaaccctcaagctgatttacgtgtttggatgaaaatatttgttaatgtccaaagcatagtgaaagttaaaacagtttgactttgaccagttaaaatagtttgactttgaccaaaatcaaaacgtcttataatctgaaacgggggagtatgatatatgcgtcgtcagtaactgaaaattgatctaattatgttggttccaaaccgaaattagtggcctttaatcaaaccatcaatgtgatgaaatgccactgataattagagcaagctattactagtgaatgctgacacaaccaggctaacatggctttaagaaggacacagcagaagaaaaacatggaacgaaagaaatcagagcacgaaccaaagagagtctgtgagataagagcaggtacaatagcaggctataagtcagctgcaaacatattttaaggagataaataaaaagagagaagggcagcgggctacagatttgtagccagctgcagcacggactccaagacactatgtgtgtatgacaggtgggaccaggtattaataatgtagtatgtaactattgtatgaatgagctattagattggctatagatgaattggagctagtagttggctatacttttaaacttgctctaagcagaaggaagatcagagagtagtcacattcacaggcgaaagagagcaaggcagagcaccaaattaaacacgcaagcacagcctaactttctagatcatgggcatggaagacaccgggaatgagaacccctctactcggaatctacacagggcatacttgctgttctctaccatccatcagccctagcatggtcgacgcacagtatacagatggagggagcaaccgaacacaagaggtacatcgatgcactgccggtgttatattaggtcttgggatgctgccgtgcacgtccgggaattagacagctagcgcacgggattccgttggatatagatgtcacgggatagattaaatgagccagagattaatgtctctcttcacaaggtgctgatttcccactccgtccaagatcttcctcctcggtatcgcgatacctcgtcggcgccggcaagatcgagctctgtatcgcgcgcggagcgcgcgacctcaccggcgacgagtccttgcggcagcatctggcccgaagcagcttgctctccccacccctagctccccccgcaggaaggtacttgatacctcgccggcggtgactcgctgcaactaaccgaagcagttgtgctctccgacgccgtccacaaagtttctcttcacgctctgcagaccgcagctctgctctccgcaccagcatgaggttacctagcaaggtatcatagcatggtttggccatctgttggatttgggctgtgcaaaagcacagttacgtgtcaccggtacgtatgtgatagctataaatggttctggatttgttggaaatagctatagctactactacaacttgttagctgaataatacaacattatcgatacttaagagttatttcatggtactccatgatgatacgtatgtatatgtacaagttgagctactgttaattgggttggattataaaatcttaatacttgactggtacccatcagattcatatgcatgggttacttgactccctcgtcggtcgggtgtgcgccggggagtcgtcgccccagggagggcagaagcgggagctcccctcatcctcgccctcggcctcggcgtcaccgtcgtccccgctgcggcctgccactttgcgcctccgggatggacgccggcagcctgtgtcaacctgcagcaggtatagccgtcaacctcctcctcggctcctcctcgagacttctcgcgctctctggctcgggcctcgaccctcacctcgccgtgcctcctcgacgccatcctccaccgttgcagccctccctcccccacatctcctcctctttttgacagtaccctccgatactccacaagtatcaggcttgataccttggtaccaaggtttgatacctaggtaccacctggtaccttaggtaccaggcatcaggtatcggtcgatacctaatcggtaccaaaggtaccaggtactaggtaccaatcggtacctaaggtaccaggtactaggggagcacacgtccctcacctcgccgtgcctcctcgacgccatcctccgccgttgcagcgctccctccctcacgtttccctctcttttttacggtaccctctgataccccacaagtatcatgcttgataccttgtaccaaggtctgatatctaggtaccacccagtatcttgggtactaggcatcaggcatcgatcgatacctagtcggtaccaaaggtaccaggtaccaggtaccaaccgtgtagcgcccgttccgtcgtggcgcctagcgggaaaattatctcttaaaaaccctaattgcgaaatttatttctttgcttgttgtctagtgtccgtgccatctcaagatctcaatccccgatctatcgtcgagtccaatttcgaatccaatccttccaaatcaaattcctccgcaaaagtctattttgcctcccccgggggtcgatgggccgatttcctcccggcccatctccccctctcccccggccctctccctcccggcgcgctccctctcgacctctcccgggcgctctctctctctctctctctctcccccggccctctcccctccccggcgcgctccgctctctcccccccgctcagctccgctccgcctcgcccgcgcgcctcgcgcgcgtgcgcgaagagccgcgccgagtgctcctcctcctccgctccgcccgcgcgcgtgcgcgtgagccgccgcgccgagcgcccccttcccctctcctcgctctgccgcgcctgcgtaagccgcccgcgccgagccaagtcctccctctccgctccctcgctgctacttcccgcgcgccgtgttcgcgtgcgcacgcccgcgcggacgccacccgttgcaagccgcgcgcgcatgccgagtggccgaccgcccggtcgccgccgccgtcagcctctgcacgcgtctgtcgcccgtgtcgtcgcgccgctccaaaccgcccgccgtcatcgccgtcatcaccgcccggcccccgccactccgcgcgcaagccgccaagggacggaggcagcgcccctcctccctttgccgcgtcgcccccgctcccctcctcctttttcccggatcggcaaaagggcaagcccctttctccccctcctttttccccttttcccccgccagcgtcatcctccctgtcgccgctttggccgcgaccgctgagcgccagctcgcgccttgaccgccctaagttggttcccaaaccgacattgccgccccctttaaaccccagctccttcccctccaatctccctcgttttcgcctcctcgccatagctgccgcccccgtgctctgttcgccgtcgccgttcgttgttgcgcgtgtcgaaggagtcggcacgagcaaggacgcggaaggggacttcggccgcgccctctccttcctcttccccggcccgaggccagagagattactcccgcgccgtcggcctctcgtcacagcgcccctcctcatctcggtgatgcctccctccgttcttccgcctcgctccatctcttccccctagctttcggtagtagctcaagtagactccccgtagttagccggcgtcgccccgaccgttgccgtcgctcgccgcgtgctcgccgccgtcgccgctcgagctccgtagcacccacacgtcgccagcctcgctcggcgtagctccgtccaatccgacgctagcatcgagttcccgaaaccgcgtagatgctctcaccgccgggaatcgacccctcgtggcctcgccgccgtttccctcttccctccccgccggttgtcgccgccgcgattcgccgccgtcaagcttcctccggcaaatccgagccgttggctcgtctcccctcatcacgagcaaccgcccggtgtgctcgcttttgtccgtatcgccgtggttcgctccgccactcggcgccgccacccgccgtccattcgcggccgggtcgtcgtctacctcccgccggcccgcgtggcagccacgtaggcgccacgtcggcgccagctcagcctagaccgggtcgagccgaccccggtctgtccctccccgtgcgcgcgttccaccgcgagccgtgaggctgcgcgtgggcccgccgcatccgcgtccaccgcgaaccgcgcgcgtgcaccgcgtccctcccccgcccgcgcgcatgagccgcgtactccctccgcacggtgagccgagccgctgacaagcgggtcccacccgggaccgcgcatggtgagcccggtccaccggctctctctctcctccctcccgcgcgcgcgcgtcttgggccgctctaggccgccttcttgggccggccggcccgttaagctcggccgagccgccctttctctcaggccgcgccctagccgccctagggaagtctatattccctccctctccccttttctttcctttttcttttccaaaaaaaaagagatttaattaaatccttttcctttagaccaaaaatccaataatcttagaaattcaatatcttcccaaccgtaaatccgtttgattccgttcgaattccaaaatttctcaaatctcgagatctatctaatggcacgcttagaggtcattaatagggctttatttttgccgtttgttgagttgtcccttttgcgtatagtttcggagcccgaagacccgtagtgcgaggatttcgaggatcaagctccagatctcgagcaaggcaagccacctttgaacatcttgagcctatatttgaaatctaattatattgcttgcaaaatattatgcattgataggattgcacttaatctgttgttccgtctgcaaggcagattggcagacctacctaacttgttgcatttgatccttccattgttaattgctataccatttccccttgtaaccatccagttgcgcctcgatattcgtgcaccctgtgccagtatcgacggtcgccttcaaacttaaaatctgagtaacaacttgggtaaaactggagttttacaaaagacttggaaaacccgacacctgggtcggtgcttgcgaactaaatgaatttccaaaaccgcagaccgggaaacgtaccgggtgtacggtttcccgctctcgcacttaaggaccgattccttggaatttcatccaaacataagacaagtacgaccacatgggtggaatgggacacccctggctgagtaactagcttatcaggggagccttgatgccgagagacatgtggattcgccggggtggtgtcggggaggacccctgggcttcctggcacagtatggtctgggacctaacctgttgttggtctgggacccctctcgtcggcatatggtaaacctgtgtcggctttggaaatgccttgtcatgaaagcttggaggtctcccgacgtggctgatccccacgggctgggtgatcggggttagtaatgtcgtgtgggtaaagtgtaccccctctgcagaggttaacaaactgttcgaacagccgtgcccacggtcatgggcggatgtgaggtgattcctagcgtagtttggtttgactactgcttgtgaaattgctgtgtgaaaaggggttcggtgtttgaaaaatctgcagctgatgggatcagctaggcccgggtggccgtttgaaaagttgttggcccgggtggccgttgaaaaagctgttggccgggtgccaatcttgtttaaattctaaagactgatacattgcacatactccgaccggacgagacgcactgtctcatccgtgtcgtttgagaagcactcacttagttgtttcagaaaagagttcaaataaaattaattgcaaaaacaccagcctttccttgaagcctgcattaaacacttatttcccatggcttgctgagtactcccgtactcacccttgctctatataaataattccccccccagttgctgaaaaagatgaagcggatcctgctgatgaggagttcttccaggagctagccggctacgatgagttttagggtttcggcctagttcccaagtcgcgcctgtgttgattagtccaagtcctggcttccgctttccttttgtaatgcagttgtgagctcgggatctgtccgcagcccaacatgactgtacatctactctataataaagagacctctgttgctgtgatattctgtctccctgtgataccagcactgtttcctgggactggtatcgattaacaggttaatttggagcgtcacgggctagttccggtcgggactagttcggggcgtgacaagagatggtatcagagcacaggcttggccctagggcgaaacccgacgcttaggacgaccctaaggatactaagttcaaaactacttgcgaaaagctaaggattcttttgttttctttattttcaatagtttgtttctaaaatggttactgatccttctccctctttcaaaattgtagatggcagtgaacgccagcttcagttcccacggttttggtgagggtcaccacgtcgctcagcttcgtgacctcgcccgtttccttggcttctcgtgtcccgagtacacggggtactctatggaccgtgttccccctcactgtgagctctctgtgtacctttacccccatggaggtatacacggagctggccttcgcccacaccacttcactgtggctaggcccaccctccagatcgcataccaggacctctcctggactgcgctttgtcgcctggcccacgactacagccaccgtctcggaggctccgccttccggcagcttccacgccttccttctggccactcagacgccaggtacccttgtccgtacagcgagtctcagccagtactgactcacatggttgagctttcggaggctcaggccactcagcacgacctactccttgaggcttaccgctcccttgcccgccgctacgccgctctggaggcccgtctggccgaggagggtgtcacctcagttgacactgtctcttgggactcaggtcgcctctgccacgccagccacctgtcctcccacagctcccgcggctctgcccgcactcccagtggcccgcgctcccccagctcgcgtgcgccgtactcaccagtgtactccccctacccgcacccagttagcccttcctacacccccggacacaccccagttgcttcctcccgccgtggcccacgctttatccgcactgcgcggaagcgtgttgttggttcttccaccgtgttccgtttccactacccagctcccctaccgccagcggcccgtgctgctgtcggccctcgacaggttccgccggtcccttcgcgtcagccgatcgacgtttcttcgactgaggagccgactactggaggcagcctggccgacgaggagtagaggaggcagtcttcagcagccgtccgtgtgttaggcccttttgttccgccgccaactcttttggagtcgtggcgaggtagtgcgtgcgtgagtttgttgtgggtgttgtttggtagtctggttctcctaggtggtgtgcgcacagtcaagctcggcgtagctctgtgacttgtccacacccgttgtatcaggtgtttttatgatttgaaaaatccagtttatgcctagtgtgtgctatctgagttgctatttactttgctccttgctctcctaagtgcttatctgactcttcccccgcccttttctgggagtttagatggctagccgcccccgccgtgcagctcgtgcaccagcccgctttggttttgaatatggtagaaccgagccggcagcaaatcatgagtcagctaatgagcagtctcaccacagcaaccgttcacaccgtactgcttcccgcaatgcagaagttgagcaaccccgccgcagcaaccgctcgcatcgcacagcttcccgtgatgcagagatggaacagtctcaccgctctcaccgcactgccagtcacaattctggagaagaacgccttccttccccacctcatgtggaaaacaacatgcagcacttaatggcagttcagacacaaatcttgcagggattaaccacagccatagccagttttcagcataatgcgcatggaaatggccaccctcacgtgggcaacaatagatccaagctgacagactttctgaggtctcgtccgccagagttctctcagaccgtcgagcccgtcgaggctgacgattggctaaaagatgttgatagaaaactcaacttagtgcagtgtactccggttgagaagacgctctacgcctctcaccagctaagaggacctgctgcagattggtgggagaattactgcaatgcacaccctgaacccactaacattgcttgggatgagtttgctacggctttccgtacagctcatgtgcctgaaagcgctattgatatgaagaaagaagaattcaacagacttaagcaaggcaacagcagtgtcaatgagtacctaagtatgttcaacaagttggctcggtacgcccctgaggaagtggacacagacaagaagaagatcaggaaattcttgaaaggaatcgcagttggaatgagactccaattgattgctcatgatttccccacttttcaacatatgatcaacaaggcacttctactcgaggatgctagaaaagaggctaccgaagaatacaagaaacgcaagtctaaccatcagggaaattcttcccgaggcgcacctcgccctcgctacggacaacccatgcaataccaccagtcggtcactcaggctaaccgccaaccaggctacgcccctcgtcctcagatgaaccgtccggcccctcagccacagcagcgtgcccctggttgcaatactgcgccaaacagtgttacctctttcaagtcaccgcagggaccgtcagcagttcagtgtttccggtgcaaccagatgggtcactatgctagacagtgccctcagaaccctaccaacaccaactcagggcatgcgaatggcagcactgccagaactcctaccccagcggcagctcagtctcgtcctagctctcaggcaagtggacaaggttcacgtgtttccaacaactttggtcgaggccgggtgaaccacattcaagctgaaaccgctcaggatgctccagacgttgtgatgggtatgttctctgtcaactccgtacccacaatagttctgtttgattcaggagcttcccattccttcatatcacaagcttttgtgaaaagaaatggttggaaaacccaaaatttacgtgtaccaatgatagtacattcccctggaaggaatataagggcaactcaaatatgcccggaagttaaccttagaattgaggaagttgacttcctaaccaaaccgatagtcctagactcgcaaagcttggacattatcctagggatggattggttggctaagcacaaaggacagatagattgtgccaaaaagtccatcaccttgcaaggacctggaggaaagcaagtccgctttacctctaacacccctaccacaagtcggtctatcctaacctgtttacaagtcaccaccttggagtcggtgcccatagtctgtgaatatcccgacgtattcccagaagaattaacgagtatgccaccagactgagagattgagttcgccataaaactggcgccaggcaccgcaccaattgcaaaaagaccctaccgaatggcagctaatgagttagcagaagttaagagacaaatcgaagaattggagagtaaaggttatgtgcgacctagctcatccccttggggagccccagtgcttctggttaagaaaaaggatggctctgagagaatggtaatcgactatagagccctgaatgaagtaactataaagaacaagtacccgttgccacggattgacgatttgttcgatcaacttaaaggagcaagagttttctcaaaaattgacttgaggtcaggttaccaccaactgaaaatcagatctgaagatatcccgaagaccgctttctcaacgcgttatggtctatacgagttcacagtaatgtccttcggactcaccaatgctccagcgttcttcatgaacttaatgaacaaaatctttatggaatacctggaccagtttgtcgtggtgttcatcgatgacatcctgatatactccaagaatgaggaagaacatgctgaacacctgaggctgataatggaaaagctcagagatcatcaactattcgcaaaattctcgaaatgcaaattctggttagaccgagtagcatttcttggacacgtgatctcctccaacggtgtcgaagtagatcccagcaaggttgaagctgtacttgcttggaacccgcccacgaatgtgtcagagatccgcagcttccttggcttagctggatattatcgaagattcattgaaggattctctaagctagccagacctatgaccgagctgttaaagaaggaaaagaaatttcaatggtctgcagcctgtgaagacagctttcaagaaatgaagaaaaggttgaccactgccccagttctcaccttgccagatatccgaaaagatttcgagatcttttgtgatgcatcaagacaaggcttaggatgtgtcctaatgcaagaacgaaaggttgtggcctatgcatccaggcagctcaggcctcatgaagtcaattatcccacccatgatctcgagttggcagccgtggttcatgctcttaagatctggaggcactatttaatcgggaacagatgtgaagtatacaccgatcacaaaagtctaaagtatatcttcacacagaccgagttaaatatgaggcagagaagatggctggaactaatcaaggattacgatcttggaatccattaccatcccggtaaagctaacgtggtcgctgatgcgctaagtcgcaaggtctattgcaacgtagctcaaatatggcctgaccaagatcgcctgtgcagagaattggagaagttgaggctgaccgtggtacagtcaggtgtccctgccagcttgacagtacagcctaccctagagtcgcaaatccgggaagcccagaaagacgacgaagggataaaagagttaataaaaagaatacaggagaagaaagacaccaatttctccatagacgatcaaggcacggtttggtgcggtccacgcatctgtgtaccggccaagaaggagttaagagatctcatcctaaaggaagctcatgagtccgcctactccattcacccaggaagtacgaagatgtaccaagatatcaaggcatacttctggtgggctggaatgaagcgagatgtcgcagaatacgtagccctgtgtgacgtttgccaaagagtcaaggcagaacatcagaggccagctggtctgctgcaacccctatcgattcccgagtggaaatgggaagagatcggaatggatttcatcatcggtttgccaagaacccccagcgggtacgactccatttgggtaatcgtggaccgactcacgaaatcagctcatttcgtgccagtgaaaaccacctttgatggaaagaaactagcagaactctacatgacccatgtcgtatgtagatttggctgtcccaagaaaatcgtgtcagaccgaggcactcagttcacctcaaggttctggaagcagttgcatgaagccctcggaaccgatttaaatttcagtacggcctaccatccgcagaccgatggtcagacagaaagggtaaaccaagtcctagaagacatgctacgagcgtgtgccttggatttcaaaggcacttgggatcgttgtttgccgtatgccgagttctcatacaacaacagctatcaggccagcattcaaatgtcgccgaatgaggcaatgttcggaagaaagtgccgcactcccttgtgcttcccggagctgctcccttaggtgctgaatctcgaggtcgagattcttgttaggggggttggtctgtagcgcctgttccgtcgtggcgcctagcgggaaaattatctcttaaaaaccctaattgcgaaatttgtttctttgcttgttgtctagtgtccgtgccatcccaagatctcaatccccgatctatcatcgagtccaattccgaatccaatccttccaaattaaattcctccgcaaaagtctattttgcctcccccgggggtcgatgggccgatttcctcccggcccatctccccctctcccccggccctctccctcccggcgcgctccctctccccctctcccgggcgctctctctctctctcccccggcgctctcccctccccggcgcgctccgctctctcccccccccactcagctccgctccgcctcgcccgcgcgccgcgcgcgcgtgcgcgaagagccgcgccgagtgctcctcctcctccgctccgcccgcgcgcttgcgcgtgagccgccgcgccgagcgcccccttcccctctcctcgctctgccgcgcctgcgtaagccgcccgcgccgagccaagtcctccctctccactccctcgctgccacttcccacgcgccgtgttcgcgtgcgcacgcccgcgcggacgccgcccgttgcaagccgcgcgcgcatgccgagtggccgactgcccggtcgccgccgccgtcagcctctgcacgcgtctgtcgcccgtgtcgtcgcactgctccaaaccgcccgccgtcatcgccgtcgtcaccgcccggcccccgccactccgcgcgcaagccgccaagggacggaggcagcgcccctcctccctctgccgcgtcgcccccgctcccctcctcctttttcccggatcggcaaaagggcaagcccctttctccccctcctttttccccttttcccccgccagcgtcatcctccctgtcgccgctttggccgcgaccgccgagcgccagctcgcgccttgaccgccctaagtcggttcccaaaccgacattgccgccccctttaaaccccagctccttcccctccaatctccctcgttttcgcctcctcgccatagctgccgcccccgtgctctgttcgccgtcgccgttcgttgttgcgcgtgtcgaaggagtcggcacgagcaaggacgcggaaggggacttcggccgcgccctctccttcctcttccccggcccgaggccggagagattactcccgcgccgtcgccctctcgtcacagcgcccctcctcatctcggtgatgcctccctccgttcttcctcctcgctccatctcctccccctagctttcggtagtagctcaagtagactccccgtagttagccgacgccgccccgaccgttgccgtcgctcgccgcgtgctcgccgccgtcgccgctcgagctccgtagcacccacacgtcgccagcctcgctcggcgtagctccgtccaatccgacgctagcatcgagttcccgaaaccgcgtagatgctctcaccgccgggaatcgacccctcgtggcctcgccgccgtttccctcttccctccccgccggttgtcgccgccgcgattcgccgccgtcaagcttcctccggcaaatccgagccgttggctcgtctcccctcatcacgagcaaccgcccggtgtgctcgcttttgtccgtatcgccgtgattcgctccgccgctcgccgccgccacccgccgtccattcgcggccgggtcgtcgtctacctcccgccggcccgcgtggcagccacgtaggcgccacgtcggcgccagctcagcctagaccgggtcgagccgaccccggtcagtccctccccgtgcgcgcgttccaccgcttgccgtgaggctgcgcgtgggcccgccgcatccgcgtccaccgcgaaccgcgcgcgtgcaccgcgtctctcccccgcccgcgcgcatgagccgcgtactccctccgcacggtgagccgagccactgacaagcgggtcccacccgggaccgcgcatggtgagcccggtccaccggctctctctctcctccctcccgcgcgcgcgcgtcttgggccgctttgggccgccttcttgggccggccggcccgttaagctcggccgagccgccctttctctcgggccgcgccctagccgcccgaggaaagtctatattccctccctctccccttttcttttctttttcttttccaaaaaaaagggatttaattaaatccttttcctttagaccaaaaatccaataatcttagaaattcaatatcttcccaaccgtaaatccgtttgactccgttcgaattccaaaatttctcaaatctcgagatctatctaatggcacgcttagaggtcattaatagggctttattttcgccgtttgttgagttatcccgttttgcgtatagtttcggagcccgaagacccgcagtgcgaggatttcgaggatcaagctccagatctcgagcaaggcaagccacctttgaacatcttgagcctatatttgaaatctaattatattgcttgcaaaatattatgcattgataggattgcacttaatctgttgttccgtctgcaaggcagattggcagacctacctaacttgttgcatttgatccttccattgttaattgctataccatttccccttgtaaccatccagttgcgcctcgatattcgtgcaccctgtgccagtatcgacggtcgccttcaaacttaaaatctgagtaacaacttgggtaaaactggagttttacaaaagacttggaaaacccgacacctgggtcggtgcttgcgaactaaatgaatttccaaaaccgcagaccgggaaacgtaccgggtgtacggtttcccgctctcgcacttaaggaccgattccttggaatttcatccaaacataagacaagtacgaccacatgggtggaatgggacacccctggctgagtaactagcttatcaggggagccttgatgccgagagacatgtggattcgccggggtggtgtcggggaggacccctgggcttcctggcacagtatggtctgggacctaacctgttgttggtctgggacccctctcgtcggcatatggtaaacctgtgtcggctttggaaatgccttgtcatgaaagcttggaggtctcccgacgtggctgatccccacgggctgggtgatccgggttagtaatgtcgtgtggtaaagtgtaccccctctgcagaggttaacaaactgttcgaacagtcgtgcccacggtcatgggcggatgtgaggtgattcctagcgtagtttggtttgactactgcttgtgaaattgctgtgtgaaaaggggttcggtgtttgaaaaatctgcagctgatgggatcagctaggcccgggtggccgtttgaaaagttgtaggcccgggtggccgtttgaaaagttgttggcctgggtggccgttgaaaaagctgttggccgggtgccaaccttgtttaaattctaaagactgatacattgcacatactccgaccggacgagacgcactgtctcatccgtgtcgtttgagaagcactcacttagttgtttcagaaaagagttcaaataaaattaattgcaaaaacaccagcctttccttgaagcctgcattaaacacttatttcccatggcttgctgagtactcccgtactcacccttgctctatataaataattcccccccagttgctgaagaagatgaagcggatcctgctgatgaggagttcttccaggagcaagccggctacgatgagttttagggtttcggcctagttcccaagtcgcgcctgtgttgattggtccaagtcctggcttccgctttccttttgtaatgcagttgtgagctcgggatctgtccgcagcccaacatgactgtacatctactctataataaagagacctttgttgctgtgatattctgtctccctgtgataccagcactgtttcctgggactggtatcgattaacaggttaatttggagcgtcacgggctagttccggtcgggactagttcggggcgtgacaaaccgggtatcaggtaccagagagtacaagtggacataccaggtatcaggtaccagggagcacacggggacaaagaaaaggaaaagggacagtcacttaaaatatcccgttgcaacggtatcccgttgtgtaagcactatggtacattcaaggaattatcacctatgaagcactgatacggcaaagcaggcgcgtgtctgtgtccgacacgggatcggatacggacacgtatcggacacggccggatacgtgtccgggacgtatcggtatttatcctgattttaaaataaataaagtaattcatgatacatttatgagacgttccgatacggtcccgattcgtttaaccctaatatttcgtcggtatcaaaacccgcgtgcgtgtggggggcatcatatccacccagcctgcgccgcctctcaactctcactctcgcctctctttcccaacgctccagcgccgccgccgccccatcagccattgccgccgacgggctgtgccggcgccgccacactgctctccacctccgacgctggcccaacactgtcaccaccaacgcccctcacgcgctccagtgccgtcgctgctgccgggctgcctcgtcaaccgtcgccgccgccgagctgcaccggcgccgcgcactgggctgtgcctcgccgcctcctactctgacgtcggcacagcactgtcaccgccgatctgttttcccgttcgtttattgaattgaacttatagtcttgaacaagtctatcggtctatcctaattattctatttgtggctgtgaacttgttatttataaactagctatgtgcctgtgccctgtgggctggatgtgaacttgttatttgtgaacttatatggtcattgcgatgtttggatataccgttgaactattaatttgtggtctatgcactatttgtggtctagcacttattcacaatctatttttaccctgttcaatttactacttttctgtatttttattttttttatatatattagcgtatccccatatccttaatttttggaaaatgtcgtatcgccgtgtcgtgtatccgtgtccgtatccccgtatctgggtaacatagattatcacaaggtaccatggtactggtacccatgatatttggaggtaccacgagatatcatagtaccatataggtttcatgggtatcgtctatatttaatctgtataatacatattgtaggcgtatccagggttaacacttgtagaaaaaaatctaaatttcagcaatttcaagacttttggaactttttgcacgaaattatttagaattttaacaaattttgattaaattttaataaaatttgaccaaattcgcaaaacaaattgaagaaaaaccaaaaaaagggcgagatatatatcatatagatacatatgaataatatctacaagcaatgaaagtcgagaagaagataataggagaagagttggtctgggatggttgcaactattttgcaggtgatacttagaaagaatagtagctaggacactagcctgcacactgctgccctctagttagctttgaggttggcacaagcacatttggcgacgttgctctccccttcgctagacaggtacgcacgcgtcgtgcgatcttctcagctcggcgcaccacgcgtcaggtgtaatgatggatgaacgtgattaactacattgtccctccgacgggacaccgttctatagtttttctgcgggaattatgctacccagctataacctcggtgatgggaagacgagtttcgttaattactccctcgttttgaaatgtttgacgccgttgactttttaagcacatgtttgaccgttcgtcttatttaaaaaatttaaagtaattattaattcttttcatattatttgattcattgttaaatatatttttatgtaggcatataattttacatatttcacaaaagttcttgaataagacgaacggtcaaacatgtgctaaaaagtcaacagtgtcaaacatttcaaaacggagggagtagttccttgtcccgttgaaattgtaagtagaattggcacgcgcagtagagggtcaggatcagcagtagatacaagactatggtcccctttgtttcttctttaacaagtggatgaaaatttggatactcatagcacactcttcaaattattaaatggtgcatttcatataaaaactttctatatgaaagttgttctaaaatatgagattaatccatttttcaagtttataataactaaaactcaattaatcatatgttattaccacatcattttacgtgaaccacttaatctttatcttcatcttttagaagattcaaacaccacccataaaaaacaattttctagacagtcaaatggagttttcgcagaaggatctgagcactgcctataaccaaacgactcttagaaatcgttactacctccgtctcaaaataagtgcagccgtggatatccgtgcccaacatttgaccatccgtcttatttaaaaaatttgcgaaaaatttaaaaatatttagtcacatataaagtactattcatgttttatcatctaatagcaataaaaatactaatcatataaatttttaaataagacgaacggtcaaacgttgtgaataatgcaaaactgcacttattttaggacagagggagtaatttttaaggcgtggaaacagccggcggtgaaaatcaaaatcacaggcgagagcgtactaggacacctgtcagtggagatgcatttccacatgcaggcatattatgaagctcgtctataggatgcattttcagcaaaaaaaaaagtccctaaattcaaattcacattcaaaatccccaaaattcttgtacttcacacagcaattcacacaaaaaaaatccccaaaatttcacctatattcaccacaaaattttgcctaaaactgccctgacctgccgatagcgaccccacgccattgttgtggtcgtcatcacggtcgcctagccaaaggactcactgcggcaccaagccccaccactgacagacccatagctgcagacctactgaggtactcctgaggatcgccactatcggatctgacgctcctgtggcctgctcactacagcaggaaggggctttggcaacacgtacatgtgttactacatatcagtataggtgttacaagcgttcccagtaacacaatctataagtgttcttgtaggccatgttactggtacaatacgttgcaacatataacatgtattactatataactaagaatgtgttgctaccttgtaacacacaaatatcacctataagaacacatattatgtgatactgcatagtaccccaggaatacataatttgagttgtagtaacataaatgtaatatgattagcaacatgtttccttattccaatacattttgtgggaacaaactttagtatatacatattcacacacacacacgatcaggttaaaggaacaaaatttaattgacattattattttctttcaaaagcaccacatatctcacaaaatactcacatcacatttagtgaaaataaagattgcattgcataacaaaatagttaaaacatccttcccatcattacaaaacataaatgataatccatttgagaaaagcaagtcttcagaataacagtctttcatactaaaatataacaaaatgataatctattcgtcttcttcttcttcttcttgaaagtctttgccggtttatcaatccatagggtgagatggaagcgaaatcaaccattaatcttccaaacctgcacgtagcaaacattactttggttgttaagctagaatgtacagcaaaacattaagttacatgaaccaaggtagaaacaactaacatacacatattgaaggccacgcaatcaccactcctttggcatgggcatcattaattgtcttgcaatgatccaatggtcttacaagctcctcatttttacgaataggatggttgattcgtactttccaaaaatggttgcctatctcaacaccacctacatgtgaatatgggttgcagctcaacaaattagcatatgccacgccttctttatttggatattttgctgtcatgagtaatactgtggaaccaacctatatttaacatttagtcaacaacctatatttaacatttaacacacacagtaatgcaaaaggaacacagtgttattacctccattggtgaagggcgcgtcttctttgaacgcacacggctttgaatcacttgatcatgtgcattgtccgtgctctttacgaacattttctgcccttctttagccatctacagtgaaataaatagtatttgtcacatggtatcagtatggatactcaaaaaagtcacagtatggtattttttttatatctacaaaaatatgtacctatgatgccatcatttggctatcttcaagatagtttattttgttcatactggaaataaaattggggagtttatatacatagagattagttcataaataggaacaaattttgtgtacattatgatgtagctaaactcgtaatggtagacaaatatagaaaagtaagcttgtattcaaaatagataaaatactataaactaaccattatataatttattgaagtgatacagtagaaaattattgaacaaatagatctattaaattacaatgcctgcagctttgttatattttttcaggtatttaaatgcttaatctgaaacaccctagacaaaataaggcaattaactagttccaagacaattgctagggtttcatcatgtcgtatccttacttctagagagtgacaacaaaatattttatttgacgcatatatatcacactatatctgaaaacatttacctcttcttgtcgaaaggaatgagcggaccatggtgatggtggtgcttcttgataatggggttcttcctggtttgcatcattatgatactagaattgtcataaaaatcatttatcatattgttatagtctttttgttgctataaaataattgtagtgccctttgctaaccttttcagtagagaatgacaagtcatcgtcctcatatatgtcctgttagtcgatcagaatttgatgattctttagttaaatgtagacacaatattttttaattagagttaatggttgtgtttccgcacgtgcgtacatatgagtactatgaattatggggcaagaatcaatttagtaacaaatattaccttgaatggatatctttgctgactcaggaggtcttctcgatcagctgcgtcgcattggactctctaaatttaaacaaaggtaagaataatacaaccaaaataacattattggttggaagctataacaattacctttcttttagaatgtactgcttgtagctgagagttgctatgatatccttttagtcgattgacctgaaaaagatatcaatttagaactaatttttgtatgaaggttcagataaaatttgtacctttcttagctttttttttttcaaggacaccttttcctgtttgtttttcctatcagtcttttctttaagcagttgttgaataagctgatcttgcttctgtgcatgctcctttaacttctccacatcatcaataatatgtatcgctacttcatgtggtgtaccctctacggtagtgatattaatgttcctgagatggtgtgatgtttggccataaacatggttgggaactggaagtagtcccataccatgcacttgtccaggtttctcttcacctaaaacttgatgtaaggcatcacctttccatgcaactcttccttgatcatcttcatccagctcaggttgttcatccatgaggctttccaactcagcctaacagtttagaaaaattggatcagatcaaataataatttgtttttaattgtagtagcatattatgtgtatagcataccaggtgttcatttctatcttcggcccttttcttgtgggttgctaagtaaaccatggctctatgcggctgcttcttttgaggatcatcttgtctctgaaaataatagaacatacaccagttatatgagtgacttatataggacaacattgaataaaacaagattactcaccatgtccttagcccaacgagcgtagctctttgtccctgcggtatgtgttgtcttcatcatggcacgactgcttttatttttctcacaaagggcctattataaacacagtgcactattaatgagaccatatcatacatcattaatttagattggcagagtattaaattgtaagcgaaataatgtgcagttgtatcacctttcccttttttgacttccaaaatttgacaagttcaacccattgatcataatcgatatcttctggacacaacttatacaaagcagatcttttctttttaggctgaaaataagctgtctttagtgatgccttgaatcgcctccaatctctccctgttgacttcaatatccattgcttgcacgattgagggtacaagaactttgtctaaaatcagtaagatatactaagtaaataaatatgttatgttttttatgttatgactgctttatgtaaattatattcatgtgggaaagagataaaaggcagagcagtaaatttaaaattcagagcaatatgcctagatttttgctcagtcacacatacctccacaagttgaagtattgtttcagctccaccattctttttgaccaatctccaatccttcaagtcaaatggacagtaagacccatttcttgccactgtgcctaaaaattttcctaacagtccaccttctgctccaatgggctgtccaagcttgttgcacttcactactatgtgattgccttctggaaggttccaaatatgtgttaaagttgtccttccacgtttgtcttctttggcactctcacctgtaaaattaaacaagaacagtagtggctaagcccagtttttcaatataaacatttagttggtcctactagttttagctttcttcattgtattcgtacctgacatattcaaggagtcatcatcttgctgctctagttcgatctcatcatcttctagtgcttgtgactcatgcaatgggttatgttcactgatattgccatctccactcttgtatttggcactgatttttactacattcaaccttttcgttcttgccatttcacctggaaattggtgcaatgtttctggaaaatatgctacaaaatgaagttatagtaattagtgcttttcatgcaaagcccataaatagtcacagaatatggagaggaaaatgataagtgatcggactaccctgtgatttatatccttagaaccctatagtccctcaaatcctcagaataatttacaaataaccgagcaagagaagaaaaaaacacttacatattgtctcaggaagtcacaagcagcctagcaacatgtcttcatggtgaagctacagggcatgtgcaggagacgcatagttctggaggacaggagaagccatgctgtgtgcagtgctcttgatggagatgggggagtttgttcaggtgggaggacggggaatgaggaaatgtgagaacgattgggttaaggatacgaagaggcagcaattatttatggtgcatgggaagttgaagggacacactaattgcttgggatttttggagggaagctaaggtttcacgttagcgggaagtattttgagagggagatttgtgtgcaaaaattcaagttctggagatttttgaaatggcatgttcaaacattttagactttttaaaattttaaatttgatccctaaaaattactacagcactctaagtactcactacaatataatgcttatctaaacaagaaccaaccatgtagcatattaatattgttttcttcagtttaaggtacatattaatattattttttcttttttcttattttttagacttatgtggataatttactttagttttcataccgatgtattatattacaaattgttgttttattgaatgcgtactataaattttaaatttttgaattagtaaaataaatcggtggtcctatataaaacaagtagctcaaggcaaccgcgcgagtgcgtggcgatgattggtgcatcgaactttagacttggcctgttttagtagccattattagagataaaaatgattcatatattttccgatattcggacacattttcggaaatagatagtctcggatagataattttctaacagtagcggatatgaaaattaattttgtaattgtttttggaaatggaaacgaatacggtaagaccattgtccagcggaaatcaaaaatggttggaaactattcgaagttctatatttaggaagctcaatttgagggggttttatattcacaaaattggttctatggcatcgaaagttctctttttttgttttataattctgaaagttcctaatttactttattagcaccccaaatcttccctctgttcctgtaagaaccctttccgtccaactcatcccgtttcctgtttctctgaccatggttgacttacattgtgttcggctacttgagatgggagctatcccctcgcgcatgagataaactttcctaaaacataaaaggaaaataataaacttatcctaaaattaatcgataaatagcattgccgtactttcttcaaactcagtctcctttcaacattcaccactatcttttccagaaccaagtccgacaaagagtgagctttcagccatcatccatccctcgtcgtctaactctatcatctcgcagccgatgcattccatccgatatagacccatcagcctcagctgatacaatcttagaccctaaattcacgctgtcgactttgctctacgttttccttaattacttaatggaatataccaaatttcacggttaacacaagcttgtcttcatcccacttgatatgaaaaggttatgcatataaagaaaattagttactatttgcggatatccataaaaagaactccggatagtttccaaccatttcctatttccgatggataatggccttaccatatttgttcctgtttctgaaaagattatattagtattcgtttccatttccggtaccatctgaaaattatccattttcatctaaactagtagggtggcccgctcaattgtgtggttagcacccatacgaaattatctattcattcttctcggatctattttaattaatcttgtattgtgttttatatggtctcttttaatattcattatttttattttaaatttcagttgtttcaaaattgtatttctacttgaactttcttttttattttctaattttggatttattttttattttaaattttaattaatctcgtattgggtttttatattgactcttctttcaaatttgcttatttttaatttcgaatttcagtagtttttaaattttattcctacttaaacccttatattgtttttatttataattttcgattttattttattttgtattccaaattttatttaatcttgtatgggcaagaaagagaaagaaaaagttctcacgggagagaaaatttccctccaacagtccaagtccttttgactgaggacagataacaaagaaacagtcttaactctcctacctcctcgattactgcatctctgaaaagctacaagcactgaagcacctctgttctcacaccacccacctaccagtacaccatatgcttgctaggtataaggaaaatccccaaatcttgtcttatcttagttcggtggacaccacaacccaacccagaagatcaacggcagtttagctcttcttcgtcggtcctctgcgcaggtgaccaccggagcgaggcggccaagggaagtgggctgcgcagcagcagcctgcaagcgtgggcgcgcagcgcgtggccgtgcaggcgtgcaggtgtgccggccggacaaaccagtaggcaggagccaaggaagagctgctaccagcttgctcgttgccccaacttgactcattgcctgccacattgcttcttgcggcatgaggcttgcttgcatccagtgagtgagctctattctgttctttattgtatagtgacaaatgaggttgtgaggagatttgtatatgatttactggtatatttgcaaattgcaatggagaagaaaatagcattgcttaattactttacaaaggattttttatgctttaaattttttattcattcatatctcatttgctaggcgccaactctgaatccttagtttctttgggtaaaccatttccctgaagcccgttggattgagcttctagacaagcctgctgccctgcagcttgtctggtcctgttatggagacaagggctaaaggatccaagcaccaatccaccaggtatggtttccctccccatgtattcttgcatttcgatagtcaacaagaacactggttcttcatctgtgtttggatgcacttgttggtttttctaccacgcttgccctatttgaataagtactatatttttttaaacacagggaatgggtcgatttagccactattaagaagttactactttcccctagaccaagtgatgactatttgactggtgtagatggttttcttgattttgcatacaatgggaaaagttctggagagaaaatccgatgcccatgtgtcaaatgtgctctaaggtggttacggaaacggaatgaagtgtatgatcatttagtttgtgatggaatgctaaaagaatatacaatttggggctgtcatggtgaaactgcagcattcatctctgctaacagagaggcacagttgcaagaaaaaacaaaaactaatatgcaccagttagtcatagatgcttttgggcatatggataatggacatccaatgaattcatctacttgccaaaattcctttgaaacaggaccatacccttgttacgtcccaaaacgaccctaaaatatatcctttaaattatgcctagaataattaaaatccgtgtgaaagcgtccaaaaattaaaatgtgcaaagtaaaagaccaaataaggcttagaggatttttgtatatttcctaaaagcctaaaatgtgtaaataaattttagtggaatttttagagcacaaataataattgttaagaaataaacaaagttaaaaaggttttataaaaaagaaaaaccctaaaaatccccttccctctcttgggccgaatccggcccatttccctccccctctctcctcttccccgcggcccattcggcccctccccgcgcgcgcgccgctgacgggcgggcccgcccgccaccctcgctgacgggtggggcccacctgtcatctcctccctcccgccgctcccattgcctcgcccgcgccaaacgccgccgccgccgcgaatcccgtcgcctcccgccgtccccgcgtgcaataaagtggggggaaatattccccgtgatcccctctccctttccccccattttcccctctctctctcgcattcaaacgggcggatttgctcctgcaaatctcgccggcgccattgatggcagccggacctcccggccggtttccttcctctcccggccgccctctcccccttccaaccctatttaaaccctccccgcacctcccgcgcccgtttccgcccctcgccgcaccgtctcctcgccggaatcgagctcgcgccgtcgccctctctctcctccatcgccgacgaccttcggccggctctccccgctcgccgggaccgtttcccgccccggcgtcgccttctccggcttcgccgcaccgccgccatccccgtccaccccctcgtcgagctcgccgaccgccggagcgccgccgaccccgtcgacccgagccgcgctgccgccttcctccgcttcggcagcctttttcgtcgtcgccgtcgacctagggtgagccgtggaccgccgcctcgtttccccctttccctcccctctctcggccgccgctccgccgtgcctatggccgccgccggcgaccataggggcgcgggcgcgccgcctcccgccggctacgccgatgtggccaccttcgggcgcgtcgagcggctgccgcgtggggcccggccgtcagccgcccgcgccctcgggtgcggctgacgcgtggggcccacggcgccagccggtgtgagcccgggtgcacccggtccaccgtggaccgtgaggctgccgcgtgggccccactcccgtggacccggtccgcgcgcccctccccctcggctgacgcagtaaaccaatttttaaattaaaatttaaataaagaaattcgcaaatattcatttaaagagcatataaacttcaaatggccataacttggccatttgaactcggaattggaccgttcaagtctctaatttttccttaagaagtcaagaacccatttttgtgctttgttccttcttgttatatggagtttattagagtaaaagcctttttcctttccgttagtcgtgtagacgctgcagcttcggaagatccgctcttcgtggaggttgaagccgacgtttgggaaagcgagcaaggcaagtcacatcatccttgaacatattgaattccagtttataaaattattttgatttaaattattgcattatcgctttatttaaattcccgcgttatcactgttttatttagccatgcctatttacctttgttatgatcttattattgttattgttattattaccttgtccaccctagaataaacaaaacccccaactagtggatactctattcatggtaccactagtataaatttaggtagatgcttcgctggttaattaggcaacattaggtggttttacaactctagactttgggaatattctcatcacctggacactatggaacggttggattattgtggatttggattcacacctccccctctattcaaaatcctcaaaatggttttaggctgggctcggggtgcatggttttgatagtagcacctcggccatataaggaccggtcttcgggcctctgttgcaaagcactaccgtacttccacatgtctagtgggtaaggcttagtttgtggctcagtctggttataaacaaaagtacacggatggagatggacgaagtcgggggtcgatggacatctctagggcaaatgaaggctacacgagctgcggcccggtagtcgagatgtcatggcacagggccggtgtcctgctgctaagggctcagtcctgcctacctgtcccggaggttccggccgtaggtggggttgggtcggtactcttgtctatggctaggatgggttggaaactatgtcacgtcctccgtccgtataccgtggtggtatgtggcatgtggttacacgtgaggaagatgtgtcttgtgggtaaagatgtacacctctgatcagagtataatctattcgaatagccgcgccctcggttatgggcaagcctagcaatgtacccaagttagtgttttaattcttaaaacctgcttaacaactaaaatatggaatggttggcctgggttggcttgggacgagctgggacccagggtcgggttgccagttcggtctgaatcatcgtaggccttgggttaaggcaggttcgtgtgggttcacggccttgattaataatattgaatagctctaggatcgtgtttacaaaatagctttgagcaactaagtgtcttttaatgctgtttactgcaaaccctaaccccctatattataagtcccttgtactcccttgcatttatactgcacttgtgggtgtgtcttgttgagtacggtggttgtactcagtcttgctcaatttttcccaaacccagaagaggagttcctggaagatgaaggctttggtgtctagctcgtgcctgccgtcaagcgcctgtggtcatcgccctagtcttccgctgtttttcgtttgtcttcctgtgtgctgggccttcgccgcccatgtaataaattaattatttacactttcgcttattaaactctatattgtatcaacttttggtgtaccttgcctcctgggacaagaaataatacacgcacgtaaggaacgcccgttgggttatttccggtcgtgacaaccctgaaacccaagctttctttgacttaattagagaggccgaccaacctttttggccgggatgtgaactttcaaaactttcattccttgtgcttttgttccatagaaaatccattaacaagtggagcaataaatcattgaatgatttgctagcaattttgcaacaagcaatcccaaatggtagcaatatacctagaacattttccgaggctaggaagataattggaaaacttgggcttagttatgagaaaattcatgtttgtccaaataattgccaactataccggaaagacaaggctaatgatgacttttgttctaagtgtggagcttcaagatggaaaaacaaaaaggataaaactaaattaactaagaaggaaagaaagaaggcagcaccaaggaaggtgttgcgatactttccaatcaaaccaaggcttaagaggcttttcatgcacaaagaaacagctgcagcattaagatggcatgatgagggacgtgtaaaggatggggcattgcgtcatccagctgattcagaggcttggaaggcaattgattctgagtttcccgagtttgcatcagattctcataatattaggtttggaatggctagtgatggtttcaatccatttggaacgatgagttcaagttatagttgttggcctattgtcttaataccttataatttgccgccatggttatgcatgaaagcttcttctctaatgctttctctaataattcctggtccatcttatcctggaaaggattttcatcttgcatattctcgaacttcaactctaaagaagatacaagaagttccagattttgaaaagtcaaaaacatggaagggtattagtggtctattttctttgccttactgggacattaatttgctccgtcacaaccttgatatcatgcatattgaaaagaatgtatgtgataatatatgtgggacacttttaggattggagggcaaatcaaaggacaatttacaagctagactagatctgcaagatatgaacattagatcgtagttgcatccacaaagacgtgctaatgacaagtattacttgcctcctgcttcttacaccatgtccaaaaaatgagaaacaacaattttgtaaagtacttcatgacataaaggttccagatggctatgcaggaaacatctcaagatgtgtaaatgttgagcaaggaaaaatttctggccttaaaagtcatgattgccatattcttatgcaagaacttcttcctcttgctttgcgaggtgtacttcctgataatgttacagctgtcttatttgatctatgtgggtatttcagagaactaaatgcaaaagtacattatatagatgagcttaagaagttagatgagagaattaaattgacattgtgccatatggagatgatatttccacctgggtttttcactattatggtgcatttggttagtcatttattagcaactggggcattattaggtggtcctgcgtgttttcgtactatgtactttgttgaaaggtatttctctctttcaaatattaggatgtattctttattttacagcaacatatttaacacaattttttctttgtgttgcctgacttcctgtaggtaccttggtgtgctgaagtcatatgtgcgtaatagagctcatccgaagggatcaatggctgaagcatatttggcagataagtgcatggttttttgttcacgatatcttgatggttttgagactaagcataaccgtccttcgaggaatgatgatacacatgagctagatagttatcctattgtgaaacaaggatcatcaatattttctcatgttggaaaaccacttggaaagcctagcaactatgttataaggggtatggctaaagtacaagcacatcgatatgtgttgttcaattgttcagatgttaataagtacttgcggtatgacctgcaccttaaagcatgtttagttatcctttttatgataggaaggttgattataaatattttgcagagctcatgctgatcagattgcaagtacgtatcctcgacgtggtgtcaatccaaaaactattgagcgtgtacaaaatgagaaattccatgaatggtttagagcacatgtaagtacagaatttcagattatttatatataatactcaagtcatcacctaaatgagttctcactgtacagataatggatctggagcggaagaatggcttgcacattgtcaacgaagatgttagatggctagcccgtggtccacttgatgcagccaaacgatatcgtgcttttaacactcgtggtttcagatttaggcctaaacgcttggatggagtgacacaaaatagtggggttgtgctaactgcaaaaaaatctagctacactaaagcaagtgacgctaatccaattttaggtgatgttacatattatgggaggataatagatattattgagctgaactactctggaaaattttcagtggtcttatttaaatgtgaatgggtggatgttatttctggaaaaggaattaaaaaggacaaatatgattatacacttgtcaacttctcacatcttatacatacaggagaaaaaattgagcatgagccttttattcttcctaaccaagctgatcaagtgttttatgtggatgacccaatgaacccagggtggtctgtagtaaggaaaatgaaacccatggacatatatgatactggcaaagaggaatggatagatgagatggaagctgagccttttcatgtttcacacctcggggagttattcgatcaatcaaacaatcaacactgggttagagctgatgttgaaggaacaatggttgatgctaataatggacttggcactgaggtactttggtactttgttagctccattcaaggtacttatatgttttcagtgtactagttcaagataattttgtagtgtctgctcaagataatcttttggttctaaattcaaatttatatatagaagatgtactaaaaaaaatctatcagttgctccttttcttttgttttcctgttgtggtctgaaatttttatattatagtacttatgctcattggtaccttctctctgcagtgccatgcttcttgtttcatatggaggaacaaatataagcaaccaatcctggattatcagaatcattaatttcaatgtaccatagcctttttcatttgattaagattttgaatgacacaatatacatgcagtgagaactccaagtattagatttcgtataggccgtgtttggttttaataaatatcttaatacatttatgcatcaccaaatgtcataaagccaatctatcttttttacatactgcaaaacccaactagaatgcattgagttgtatgtgtggaaagtaaagactgtttttttaatctaattttagctgacactaaaattgaactctatagctttgttatcctttttaaatgcaactgaattgaccataatgtttttctctaggaaattaaaaccgcgttgtcatgcacatgctcctacaggtatggaaaggaataaacaatacaagatgctggaagagaatggtaaaaacttaatagttatccaagtcagtagagaacaaatgaagttttcacatgtggcaaggcctacgtcaagcagtctattggttacctagttgtagctgtgattttgcaaggcttgtactgttgcaatgcctcatgttattccccctttacctgtaggctgtagctttgttctagttctatttaagtcttttggactgtgcattcctagactgtgaacatggactttgagaaatgagcaattatattgtctgatggtaaatttattttcttgttacaaaatgtgagtggttacaggagatttctaacttgtatgatgcatatttatataatgactaaataagttggatgatttgaactcatagaaaggaactaacctgaatattgtctgtataaagaatatattctagaactctacgtcaacttgtaatttttgtgacatttgtgacataaaaatagaaaaggtgctccacattttttttctactcttataatttttcaaatctttttgtttttttccacaaatagtaccaattttttgtttcaatatctaggacaaaattagtgaaatttcaaggatatatatttcgataattttgctttatccccatgctttactctttaccaacacgatcaaattattaatctatcaatattgaacaagaatcacagccaacactatttttgataatcatatagtgtgttattgtaagattgataaaccatctacatgtaacatatttgtgcaactcatatattatgtgttacgaggtgctttgtagcacatgtttgtgttactgtctgtatccttgtagcacatttattcaccctactaaaaatgtgttacgggatctgctaagaacacaaagcatgtgttactggtttatttccctgcaacacagtttagaatgtgctactgccatgtgttgccatagctatattctgtactagtggctgctgctagatgtgcagaacgattatgcgcagatggtacaatctccaagcgatatgcgatccagaaagttatgtttccccatggatattatatattctcgaaaagataatcgagtctactttcagttccaacaaacggctcatcgtttttacttaccatgacggagtaatgactattttactatagctacacagaagctgaaaaggctacgtgaacctcctcgggaatgattgtaggaggcctttgagctagcccagttcaccgaattacattagttgtttcatccccatctaggatggttattcttagtataaatatcccctgtgttttatcatttcgaagacttttgacaataaaaaaaatgaacacctttagttcagctatatgctaacaaattgagatactgatctctacctcttttactcttgtggttttcctgtgggattatagaagcgaccactttatcggctcccaattgttgctcctactgcctttgaggtttttatcgattgattgttggttgtgttggttagttctttgtagtggttgggcgaatccttgattcaggttgctggttaaagacggtggttagcttcgagttttatttggcaggttgcactacgtattttggctgcttgcagctagttattttggtctctttgcagctagttatcctttgttgtgaagactaggaccacaccccatatcaactcctatggtcccaaattgatatgccattttataactatcaatgacaaagagcgcagttttactttacatagaaaaccctcctctctcttctccatgtcaccctaaaatcaaaatcctacacaaaatgccataagtgacatcacaatattatagatgccaatggataattaagtcgagcaagtatatattatcagcagttaccaccccatccatgaataagccaactaagaagtttcttgattaattagaaaatactcaggctaacatggttttaaaaggccagctgcaagttaaacgtatatcaaacaacgcaaacagaagggaggtgaggtagcataagtgagatgagagagtagccagcactactggaggaactatctttactgggttgaccaaaaaccacattagtcctggtttgaataggaaccgacactaaacatcttttttatcccggttaaaaagcccaaccaattttttttaatccttagttccggttggtaacctaaaggtcatttttattcccggttcaatagttgttaggcggtgtcaagcccccccagggatttttagtcccggatggtatcaccaaccggcactagaaatatccccccacctctttaatctcccacgcctttctcttgatctcctcgatcctctctctctctctcgctctctctgtctctcccgatctctctcgatctccctgtcctctgctctctctatctctccctctgctctctctggctctctctatctctctctctctctctctcttgttgtctcgacggaagcaaccgcagtgtccaggcggtggcccggcaggggaagcggcggcggcccggcggtggaagcggtggcggccgcggcctccccgccaagtccagcgggaggggaggccagccggcagtggccggcgaccttatcctctcctccgctagatccggccggaggagatgcagcgggatgggaggccggccagcagtggcgatgttgtggatgttgttgatctgtgaatgtatatgtgcaaatttttctaagttgtgaatgtatttgttaatgtttctgtgaatgagtttgtgatgatctgataatttgctggtgttgtgaatgaatttgtgattaattatctgataacttgcaagcaaattaacaaaaaaaagggaaaaaaggacctttagtctcggttattggtcccaatcgggactaaagatggcagtaccagtcacgtggcgctgccatctttaccgtgactaaagatgtatcttagtcccagattcgtagtcccggttgcataaccaggactaggggggttccgaaccagttataagcacttattataggatcgaatcacaataactaagtcaactagaggggggggtgaatggttggtatacccaaaaactgaaaaacttttagcggaaataaaagttaccctcgaattcgacggatcgcggtctgaccgaagttgtcttgccgatctgatcgcatggttgccgtcggtctgaccaagattagatctccgatctgaccgccgagatcagctgctattcgctgtcgtcgccgccggtctgaccgccgcttgccgccggtctgaccgccgcttgccgccggtctgaccgccggtatatcgccggttggaccgtcgaaacccggtaaacacaaatcgaagaactcttaaagtggatgacgactttattgattctctctctgtgtttacaaagtgcacaatcagcactccttacaaaaatttcgactaaactcgaaaccctaactcaaaactcaactcaattgctctcaaaagcgataccgggaagcctcatgctccccctctatttatacatgaggtaggcagcctaaagccacgaaccaaactcatactaagagtcctaaacaccttaggaaaccctctagtacaagaaagaaactttacataaccaatcgtaccaaatttggactccttctaaatttgactccgcatcccatacgcacacaatacctccatcgtatgccatatggaatctccatcaaccacgtgcatcaactctagcctaagtattccacatgatctctgaccaccacggacgtcgtcttatccccaagccgactcccggtccgtcaccgcaaatactctcccaaggcatcgagtcacctacacatggaataaacaaagaaaccatattccgagaccaagctatctccaacttgactcattagtagcaaacaacagtattacataagtatagtatccatctagaagccagaatcatgaaataatcacggatatccaaactaataacccgaaaccgaaaccgacacagcgtcggccggtcaaaccgtaggctgcactggtctaaccgcgtgatacacgccggtctgactggctaccagagcccggtctgaccgatcacataaaataatagaacctgcgattcacctgtaaatccaatcatctccaaaaccactttgtgaataaattccaaataacaaaaccaataatctccaatgccaattgttcatcatagaataataatcaaaaacacctttgattttacacttataactagggggtgcataaccacttataacacaaggtggtgcactatgctctgggctggccttgggtgctagctgctgtgcacagtattctatctcctcatgaagaaaattataagtgttctttcggaacaaatggttcttcgatgaatttaggaggatttcaggtctatgaaaattttccatatgcagttcattctatccagcaatcttaaaaattcctttacattagctcaaagcacaaggattttagactaattttaacatgaagtctaacctcttgaaaaaagaatcttttgtgtctatgtctcttgtgatttatgcgtttttttctatgtgctccatatcgatctttgcgtcgaattggagcaatcggtacatgtaccgaatctacaacggctccatgtcagtgcatggagcggcaattatttggatcagtgataggcaccaatacaagtttcagatgctaattctatatttcaagagtacatatgaacctacagggtcgcacgcttaatgggccggaataaggggattggatagagatccaatatgagcttaattcggatagggatccgaataggagtcctacgggccttggaggcccgagtgatggatcctatatattcgtgaggggtgtgaccggcggaggcatttgcatcacgtaagaaaccctacccgtcacttttggaccttggggcatagattgggttggacatggagatgtcaccaaaacagcacaagagtcacatatgatgtgattagcaaggcgttgcttacctattttgatagttgtctagctgtgattccaaagctcactagacactaataataaaatgaggatcttgactcactatgttactagagggaattttgtttcacaatacatagtgggagtatcttttgttaaattgtttaatcaaaggttaaatgtaaatatgatgctgattttgcatacatatatttctattgtagatcatggcagctcctgcaccatccaattttaacttgtggtctattcttgagaaagagaagttgactagaacaaacttcatggattggtatcgtaacctaagaattgttctcaggtaagagcacaaaaagtttgtgcttacacagccttttccagctgactttcccaacaatgctcctgccgctcaacgtagggagcatgaaaggcgatgcaatgaataccttgatataagctgtctgatgcttgctactatgtcccctgagcttcaaaggcaatatgaggcattggatgctcatacgataatcacgggactacgtaacatgtttgaggaccaagcaagggctgagaggtttaatacctcaaagtccttgtttgcgtgcaggcttgcagaaggtaatccagtgagcccacatgtgatcaaaataattggttacaccgagagtctggataagcttggctttccccttagccaagagttggctactgatttgattctccagtcgctccctcccagttttgagccattcataatgaatttcaacatgaacaacctgaacaggaccttggcagaattgcatgggatgctaaagactgccgaggaaagcattaagaaaaactccaaccatgtgatggttatgcataagcgcaagcccaacaacaggaagagtggtcaaaagagaaagctaaactctgatgagatcacgagtacaagcaactctaagaccaaggttcaaaagacagtgcccgctaaggatgcagagtgtttcttttgcaaggagacaggtcattggaagagaaactgtaagaaatacctagagcagctcaagcagaagcagcaggatggaaagagttccacctcaggtattaatgttatagaaattaatcttgctacttcctctactgattcttgggtatttgataccgggtcagttgctcatatatgcaaatcgttgtaggggctgaaaagaagtaggagcttagcaagaggcgaagtggacattcgcgtgggcaatggagcaagagttgctgctgttgcggtcgacactatgccattatctttaccgttaggattagttttggagttaaataattgttattgcattccagctttgtgtaagaacgttatctctgcttcttgtttgcaagcagagggttatggttttagatctatggacaatggttgttcagtctattataatgacattttctatttccatgcacccatgatgaatggcttatacattgtgaatcttgatggatgttcagtctataacattaatgcaaaatggcaacgtcctaatgatttgaatcccacttttatttggcattgtcgcttgggtcatataaatgagaaacgcatggagaagcttcatagagatggacttctacactcgtttgattttgaatcatttgagacatgtgaatcttgttaacttggcaaaattacaaaggcacctttcacgggtcaaagtgaaagggcaagtgaactattgggaccagtacatactgatgtatgtggaccaatgagctcaactgccagaggtggttttgggtactttattacctttaccgatgactttagtagatatggttatgtctacttgatgaggcataagtctgagtcctttgaaaagttcaaggaatttcaaaatgagatacaaaatcatttgggcaagacaatcaagtatctacgatctgatcgtggtggagagtacttgagccttgaatttggcaatcatctaaaggagtgtggaattgttccacaactcactccgccaggaacgcctcagtggaatggggtgtctgaacggaggaatcgtacattgttggacatggtgcgattaatgatgagccaaactgatctgccgctaagcttttggggttacgctctagagacagctgcgttcacactaaatagggttccatcaaaatcagtggataagacaacatatgagatatggacagggaagcgtcccattttgtctttcctaaagatttggggctgtgaggtctatgtaaaacgtttgcaatcagacaaactcacacctaaatcagataaatgcttctttgtggggtatcctaaggaaacgaaaggatattatttttatcatcgggaagagggcaaagtgtttgtcgcccgacacagtgttttcttggaaaaaaagtttatttcaagaaaggatagtgtgagcatggtgtgacttgaagaaattcaggaaacaccagaaaacgctccaacgtccacacaaccacaagctgagcaagatgttgttcaacaggttgaacaagctgttgttgaaccagttgtggaagcaccggcttcacgaaggtccgaaaagatacggcgtacacctgcgaggtatgcgttgttaactacagtacaatgtgatatattgttgttagacaacgatgaacctactacctatgagaaagcaatggtgggaccagactctgagaaatggcttggaaccatgaaatccgaaatagaatccatgcatgtcaatcaagtttgaaaattggttgatccacctgatgatgtaaaagccattgagtgcaaatgggtctttaagaaaaagacagatgtagatggaaatgttcacatctacaaggcacgattggtgacgaaaagtttcaaacaaattcaaggtgttgattatgatgaaactttctcgccagtcgccatgttaaaatctatttggattgttttagcgattgctggctatttcgattatgagatatggcaaatggatgtcaaaacagctttcctcaatggaaatctctatgaggatgtgtacatgacacaacccaagggatttgttgatccacaatcagctaaaaagatatgcaaattgcataaatccatttatgggttgaagcaagcatctcggagttggaatattcgttttgacgaagtagtcaaggcgttaggctttgtaaaaaatgaagaagagccttgtgtatacaagaaggttagtgggagcgcattggtgtttctaatcctatatgtagatgacatattattgattgggaatgatattcctatgcttgaatccgttaagacatcgttgaaaaatagtttttcaatgaaggacttaggggaagtagtatatattctgggcataaggatctatagagataaatcaaagaggctaattggattaagccagagtacatacattgacaaggtgttgaagaggttcaacatgcaagattctaagaaaggtttcttaccgatgtcacatggcattaatcttggcaagaatcagtgtcctcagacgactgatgagtgaaacaagatgagtgtgatcccatatgcctcggcaatcggatccattatgtatgctatgctatgtacacgtccaaatgtttcatatgcacttagtgcaacaagccgataccaatcagatccaggtgagagtcactagataactgtaaaaaatatcctgaagtatttgagaagaactaaggatatgttcctagtctatggaggataggaagagctcgttgtaaatggttacactgacgcaagcttccaaaccgacaaagatgattttagatcgcagtctggatttgtgttctgcctgaatagaggcgctgtgagttggaagagttccaagcaagatacagtggctgattctacaacagaagccgaatacattgccgcttctgaagcagcaaaggaggttgtttggataaagaaattcgtttctcaactaggtgtgatgactagtgcttctagccctatggacctctattgcgataatagtggtgccattgcgcaagccaagggcctagatcgcatcaaaagtccaaacacattttacggcggtatcacctcattcgcgagatagtgggtagaggagatgtgaagatacacaaaatacatacggatttgaatgttgcagatccgttgacaaagccactccctcagcctaagcatgaggcacaaactagggcaatgggtgtaatatacattcatgattgactctagtgcaagtgggagactgttagtgatatgccctagaggcaatcatagagatgattgtatcacatactatgtttacatatttatccgacattgttccttgaaatagataactccttattggttaatgaatatgtgattctttcatgagactctttatgttgtttgttactatttctaaaggatccctgatcaaatatcatatgtggaacaaatatgtttatatgatcagcacatgtattaattgatcatggtatagagataccaaattaataatgtggacacatgttggtgaacatgttgttagatagacccaacatgagacactgcaagagccatatgtgttgtgtcatcagtgatctcattgagtgttgctattgaatccttagacctgagattatcatggttctcaacatgtgtagtagcttacttagggactgctaaacgctactccataattgggtagttataaaagtagttctcgggtatgctatgaaacatgtagtgggatatgaataatcaagatgggatttgcccctcctatggagagatatctctgggcccctcgatgttgtagattatggaagtgcatggccatgccaaaggtgattgaggagttaatatcacaagttatataatctatcaacaggttcgagtgaatgattgagctattagaggatggcacatatctagccttgagtttaatcgatatcgtgaggcaaaagggttcatacaagtatacactagaggttaagccgatatgatctttatgtatgcccggtgggtcaatacgttctgctaggggccactgttgacgcgtggactgaaaaggagttttcgggttacagccgagtatatatgaacctacagggtcgcacggttaatgggccggaataaggggattggatagagatccaatatgagcttaattcggatagggatccgaataggagtcctacgggccttggaggcccgagtgatggatcctatatattcgtgagaggtgtgaccggcggaggcatttgcatcacgtaagaaaccctagccgtcactgttctccccgagcaaaaccctagccgcgcgcgggtgctagcacatctgcacgtggcgatccgtccctgtacgtgtggataccggtagaggcaccgctggtttgcggtgctgatcagcgtgggagtacggcgaggagaacgcacgaggaggagaaggtcgagccggtgcgatcgactacttcatctacatcgacgcgcgctacttcgcgagagttccttcgacttctcaacgtctttttccgctgctcaacgcgtctagtggtaacgatctatgatctaatacttgcatggttcctggtttacgcgatagaaaattttgatttatgctatcatagcctacgcgtatcccaacagcacgcccatgaattctacctctagaagaagaagaatctaaggcctccttcagaaagtgttcttataagaattcaatcatacgaaaatttttcatatgtaaccctaacaaaaagtcctacgaaattctttggattggctcaaaacataaggattttagaggaaattttaaatgaagtctaaccacttgggaaaaagatagatcgtttgcatctatttctcttacgattcatgcgtattttctgtgctccatccaaatggtctacctgtagtatttgaggtgttacggcacttcaagcctgcattattttatacccgtattttgagaatgatgtgttccaaagaagccgtaagatgtgaagacaagagcaaaaatactactctcttcatcctaaaatataagcaattataggatttaaaatatgttccacgatataagcatttctagctcctgatttacatgctcgagaatccatatattttcagccaaccaaatgcttgagggaaatgcatgtcagcaattcaaaactaaaaatatatccaccaattaggtgattgaaagagatctttttcctaactctttgaaattattttattttgagggggactgagtacatggtagtttcttatgccgttacagttagttgtactaggaactgagtagcaccctgaaagaagctggaggatgcatgagcggcggcaagaacaggttgctttcgtgcaggcttggaagacaagcatggtttttatattcgatcaaggattgacggggctatataatttgcacttgtccagctcagattatgcacacttgaatttgatctcattgttgaaaagtcaaaagtaatgtaactccataggtaaagagaaaacttgaaagaactatcccgagagctttctttttttttttttgccgggacggccgaaggaggtcgcccaaattgtattaagaagaaagagagcgaaaccagagggtacaaagatcgactttatcccgagagctttcttccagcagatatacgtactctcagtcagaatatgtatgcatggtgtacttcagagttacgtagagaagcaagttactagcttataatcagcaatcgcgacacttttgagtgatcactcggtggtctcaatttaagaatatggcagcagcaaaatatggaactagataacactagcggttgtgactgagaactagctagcattaagaagagaccaaagactagtttaccatacagtacatttacaagtccagagatttccccgtgagccaccacatttgttttccagatcatgggaatggaagggatcgggaacacatatctccggtgcttcagctattgcaggataaggccgctgcgtcttgtcgtgcatcggctcaagtaaggtgtatactgatctcaacgcggtcatgaattgcagggtaaatacatagtactgtaggatgcccgaaatgctgcggaaagcatccgtttggcttactgcactgtcatgcatataaggttgctccactgcactccaaagcgcggtcgagggccagcaacattgcgaatggtttttcatctaggtttgtgaagagagtgctggcccaggagttgatcaaggggtagcacgcgcacaacaagtcatttctgcgtgcaatctgtactcctaaacgtaattactgaattagaaactccctataaattgttgtaaagaggagaaaaggtttaataaatatgaccttgtatataagtggaactgggatataatggttcagttgaaaaaggtttgaatttttaaaattgttgaattaaagtacgcattgatatgggctataaatatatttacactgaggaactcctcgagccaatatatatgaagtacaatatttattatagtgtatttatgtgacacttttgcacatatatagaaagacaagggaaagtgtattcatccctcaaggggatatccccacgtttcatatatgtcatctaaatactccctccgtttcatattataattcgttttggcttttttcttagtcaaactttcttaaatttgaccaagtgtatagaaaatatagtaatattttcaatacaaaacaaatatattatcaaaatatattcaatgttatgtatcatgaaactaatttgaattgaggatactgttaaatttttctataatagtcaaggaaaatagtcgaaacgacttataatatgaaatggagttatcaaaaaattagaaacaaattgattgacaagatagattaatatgaaatgtattactccacaaacatgcaagttaaaattaacttctacaagttgtaacaaaaataacaaatataactacgaatgtacagtaactattttcagttgatttgttttttttgcaacttgtagaagtcaaatttgaccttatatgtttgtggagtgatattgtaacaaccctccctccagaaccacgtagcccagcccaaccgacgggcggacccacttacacacaacaccccacttacactttcatcctcgcatcgtttaaaagggttaacctgggagtgatatggttggagggtagaggccttataagttggtaccactcgtaataaactagcaaggtagtactaaacatgcacacacagctcacatgggccacacaggccaaatcccaattgagccaggatgtcacagatatatttcgtattaatctatgttgtcaattttttttattttttgataactatttggataacatgccaactacgaggggacatccccttatgtcccctcgagagatgaaaatccatatcagagaggcaagaaaaaaaaggaagggttatgtctaatgtaagatgacaaggttgaagtgctagctagagaatctaaggtgacaagggactaaccaatgcaacatgcatgctcacacgtttcatgcccaatttgactattgaaatgggtggcactaggaatcctgttgtcttacgccattcacaatgcacccatgagacgtttggcctgggtagacggaaccaaatattcggtgccacctcctccattagaggagcaaagcgaagaccgcatagccaaactataccacatgttcctagtcagtgtttgcaggtatggtccaaactagtgctccgtgccaccaaggaagggagagagagaagggaggagaggagagggatgtgtggttgtcctcgtgctccacaccgccgagcttgtcgcctagtggcgccatcctcgtcggagaaagtcgccggctcgatggagaaagcgacggagaaggacaagccgtggttttgttgaatggtttttcatctaggtttgtgaagagagtgctgccttgagtcttcaaggtgtatcacgtgcacaagtcatttctgcgtgcaatctgtgctcctatacataattactgaattagaaactttcaataaatttttgtaaagaggagaaaaggttcaataaatatgaccatctggaaccgggatataatggttcagttgaaaaaggtttgaattttaaaattgttgaattaaagtacgaattgatatgaattataaatatatttactgagtaactcctcaagtcaatatataagaagtacaatatcacaagcactgacctaaaatctctgtacgagaaactaaaaataaacacagtgtgcataactagttcagagatgttctgagttcagaatgcaaatttaatcagcaactttgttcagagttcagagttgctcatagtaatttgatagtgcattcatagccaagcagacaattcacattcaccaaactaactatagatagattcacgaaaagctgaagtggttagagatctgcacagacaaattctactaaaatgtaccctactgttcctaaaattttgtttaggggcaggttttgggtctcccctgaagatgctctaagttcatgggagcactcgtaaaaaaagcagtggcgcggacacaaaatttcaaggctaagtattcacttaacaattacaagcgttgcccccctagtgtttggccatccggttgacaaatctattggagctggaaatttgcctaaacttgtcaaattttggttgaagaatgggatatagaggctgttgcagttgttcttagtgggatagagtttgtagacttgaggtagttgactactaagtgatgtgatccaggagtctagaaaaatatatttgttgagaaaaaaatattgagaatgaagtattagatctaattaaatatatatatatatatatatgtgacctacatatattaattttgttttgtaaattttagggttgcgtcccccactgaaaaattgttttattttcccacctagggtagctgggaggcttcaggtgagaagactgctagtatttaacttactctggactctggagggtgaaggacgtacgtacaaaactagtgggcaagtagtaataaaaagttagaaacagttgtgtttgcatctatataaaaacatagcaaaataaggttgaagtgctagctagaaatctaaggtgacaactgacaagggactaaccaacatgctcatacgcgttttatgtccaatttaactatagaaatgggcggcactaagaatcctgttgtcttacgcgaaagcctaaagcgtgttcatcttcattttgcagcgtgtgcagtgggcatgtgtgctaccatgaatactgagcaatccacaaatcataggtacggccccaagagatgtacctagttgaaacgcagaggtggacaacatcgatgcttctctgtcatccttacagttgcggtcattaagcttttattgcttagttagaaacacatattaattacaccttccggaaatgtgttcgttgaatgaccgggatactactttttttttttacatgtgactgggaaaatagaccacacagagttagctcttcagttctgtcacttaggtccccgtagtttttaaaatatagaattagcaccttatattagtttctggtgtgaatcactagtctaaaagcgatcaccgatttgttccatgcgccgataaagattttagtagtcatcatcaattcgacctgaatttagtgtggctttgccaagaaaatgtaaaagataatttcaattgttcaattttctattcaattgacatttcttgataaaacttttttttcaaaagacaatattgtatacctgaggtcactaaacaattagagcagaaatctctattgaatttatattggccagaacacataaacatgcaactcctaaatatttcaataacaacatgatgtcactatcaatatgtaccaaaaggccgtgccagagtcgatgaactcgagcacccatacatagcaccgatgcaatcgaaggagccgatggtccaggcatagaattagagcaattggtgtgccgaaattctgcatactccacgtcagcgcgcagagtgagtctgcaactgtttgacccagtgatgggctaaaaaaaatttgagatgctaattctatatttccagaatacgcagacataaatgacacaaccaaccgaataagtttaaggaccaaccatttacattccaagagagtacatactacagagacataagtgacacaaccaaccgaataagtttaaataccaatcatttgcttttctcttcctgatctcttgggaactactccctccattctaaaatataagtcacaaccatccttaacccaaagaccaagaattaattaatatctcatgtttgtcatgaatcaccccaattaatataatacatgcaatcaatagaattaaaaatcttatgagtatagaatttaaaataataataatttaggggagagaatgcgctaattaattacatgcatgcaaccactttaaaaagtagttgtgccctatatctagaactggagggagtagcaacattttaaggaccacagagaatgtagtcaaggtcaccagcaaagaggtgcaaactggcacggtacacacatcgctagcttgtaaagtgtcacccacaacattaattgttttctagatcatgggcatgcaaggcaccggggatgaaggcccctcctcttgtgacctattcaccgcaacaacgatgatttttgccatccattagctactgctggcggaccgacacaaattctattgatggagagagcacgtccaaagcagaagcagaacaacatagagtcatctctgaacggatgctgccttaggccttagattggttcggccttgggtgtcgccatgcatgcctgtgaattctaccactgcaacacggaaaaatttggagactagaagagccatatatatataatgctatatcatgtattcctatgcccgttagatttgtactgggaattgattcgttgagttggaaacgtggagtggcaagaaaaggccgcattagtgcgcactggacagcttggatgatgagcacggttgtacatatgtatgccatgaagaaaaggtggtggtttttttaattttcgatttaattagattgagtttctccctaccggggattattttgattaaaaaagggagaaagggtttatggaaaaggaggagatcatggagaattaaaagattaatttacaattttattttttgatggttctttttaaaggaatcagtatgaaattgtgctctttccttgaatatagtgataaaaaaacgcccctaggggtaaagtcccacggtgcatgtcattgcgtatccttcattatttttacaaaaaggctaggtgctgcggtgtactctccatcagaatatacttggggcatatactactatatggtacaaaacgaaactcgtattattgcatgattaattaagtattaactatttttttgaaaaatggattaatatgattttttaaaacaactttcgtatagaaaatttttgcataaataacaccgtttggtagtttaaaaagtgtgcgcacggaaaagagagaggtggcggcctggggaaaatgggggtagaacacagccaaagttaggtggagtaagttatttaatattcagccgttaccacatatacatcttaggtgatcactcggtggatatatagtcaacctagcttgtcttaaaagtttcatatttaaaacgccagtaccaaatatatatggatcaagaaaacacaaaagggttgtgagcaagcacaaagccagggaccaaagagtagtacacacccaccaaattaatctgcttctgaggcccggagccacatgcatttcctgatgttgggaatggaaggtcacaggaatacatctatcagcttcttggagcgccgctgagactgacgagggaccgggcatctgtcaagtacaaatgcagcatgtcaaaatggatgcagagagcttccctgtggttttacacgttgtagggcatgtccacggccgccgcccgtcagatccagtctggatccggtgagctcatgaccgattcttgggtgcgcgctcgccgcccttccaacgcctgcggctgctgagccaccacctatcaggttcagtctgggtgaggtgagctcacatccaccgattggttgtgcgccttgatgctgatctcacctcgcgaccaccgcgtattggatgcacattcacccttgcaaactgtacagagtactctttgcttgattgatcctacgattgtatggtttgattttgtcgctcatgtcattggcatttcctacgtgcaatgaagagcttgtttggagatagactgaaacccgtttaatgatgaaggtttgtgcgtgctgttggatgtttggcccgagatacagaggttccattgagatgccatttctcgcacagcatccggtggtggctaccgtgaaaggaggaggatcttccagctgcagagcgagcaatctgagggcatttaattgggacagggctaacgaagttggatttacgaaaagcttttttttagacaattggcttgtactatacgatggtattattttgaactgtttctcactgagggcaaaacttaatgtccatctttccatgggactgaaatacgacatcatcatgggacctcttatacatatatatttttcttcaaaagaagtatctcttgtatattttgttagaacacgctacgtgatctctctaaagtcgagttatgagcatttagcattttgagacagcgctaataagtcggtagtaaattatttcctccaaactactagctagtaaattgaactaaaaaaatagagcaatgcctggaccaatggccttaaaggcaaccaatacatagatgcaacaagttacaaggatataatgggagatgggagtatccaccgatcccacagctagtcacaacagttggggcaaagttacagggcatccagcaagtatagtccacactagtgtggcatccatcgtgtgaatatgctccttaggatcgagaggcgtcggaaatttacagaagagtcaaaaaccatggcattgtgttaggcggcacagccaacatgcagggcaataaaaacctaccacatcgcacaactggtgaaacgattattaatgacagcaaatgtgatcgttaaaagttcgaatgtagtcgttaaaggtcaataacgatcataaaatgtgatcttcagtggtcgctaaaggttacgtcgtttatagtattaacaaccacgcatgcaattttcttccggtcattattttatgaaagacggtgtttttctgctgtcgttatttcataaagcgcccagactttctaccatcgttattttattaacaaccgtattattatgtcatcattatttgtattaactacggttatatattcagctcaatgaccacactcttaagaagaaaataattttaatggacaaataactgaaaactagtgataataattctttattcatacaaagaaaagaactttaactcattcattatcagggccggctctaggcctaggtgagttgtgcgaccgcctaagaccgcagaggggggccatcactaatcccacccaactcccatcctcggccaatcggtatggtttctatgtggatagacaggcggggctgcgagggcgacgctgcgttcgcgttgtttcctctcttccttcacagttcatcttgttccgcatcggcactttctcccctacttcctccctgaccgtgatttgcatctcccaagtcccatctgcgccgtctcccatctcgatgacatgcaaccagcagtggcggccagcaggacacacacgccttgcccttgcatcatgctgactcccttaggtcttcttgtttccatccatagtccgaaatttgggttctgattttttttctcgttcttgttgcttaatctaccttgtaatttcaggtgttagaatctttcgtaaggagcatatttcggtgctaaaaaaagaaaatattttaaattaataccatggtgatccatgtccaaagtcatcattaacctaagatataagatatatgagagattccaattgtgagcgtttgatctgaccatgactaagcatttcctaaattaacatctagtcatactaacaagttatcaatgatacaaggtgatcaagctatggctgagataaaataaaccaccccacgtgacattataaaacaatgcaaatttaatagaaagcgggacatttgaaaaataggtacgatatgttcaacgagaatgcgtgacttgccttactcaagtgctgctgcaacccctacaaccacttcaaagtaaacgggaacttttgaaccaacagaatctaagtgacatacaaaccacacaaagaaaaataagctacaagtctaaaaaacatagaacaaaaccatttttaatggattcgatgcatttttatgaatttactacaatttgaatgggcttaaacggagctcggatgaattatcaaatattcattgtgcttttactaataatagaaaaaaattaatggattaatgcgcattaaaacctgatggctgatgaaatcgagagggaggtgggcgccagcaagtgagcccaacccgttagcgatgcaaggcgggcggtgcactgtggaccgagtccatcgggtcggggacaggtgcaccacgtggcaccgacgaggtagccacacggacagcgaggtggacggccccgatgtgccgaggggcaaattggactctagtgaagtggcaattagtggcttgccgtcccgacttggtggcggcagcacatgcggcccgaggcgagcgtgcggagcggcagtggaagaagaggaagggaaggtgcagctcaccgagggctcacgacggcgagatgcagcgcgagaacgacgacaacaaggtggaaacagcggcggttctgggatggcatcgacgacggtaatctagtgatggggaggacggtggaggcggtggatgggttccagtgtgacctaaggaagacgaagggggagtttagaggggaaatggggttgcgcggcagcgagcattgtcggctggagagggaaaggaaaggcgaggctcaccggcatcttgggagaggcgggttccggtggcggaatggaacgatcatgtggcggccgaggggctccttgacctcacgaagctggtggcggtgacggtgtggctcggttgcagctttagtggtggtgagtagtggccggaggcggcgcagtgggaggaggaaaaatggtggcgccgagcttgattttgggttcaaaaacaaggaggcaatagtgggatgcacggagtggggtgcgcacgtgcggctgggtgcaggacgtcggcgtttggggcgcgaaaggtgtgccagagacgacggcgtggctgacatcatccctgcccctctcggctagaggttggagacaaccccgacaggtgcgccccacctgtcggcgtcccaagtacggaggcggcacgggtggcttgctgggccataaccttcaaccagcctagcaagtaggggcacggtgtcgggcgtgggtaggtcggggagagggagttgggccggaagcggcccaacggccgatgaagagaaagaaaaggatttcaaattaattcaattccgataatcgtttttgatttatttaaattattttctttgatgtgaaaattccactacaaatcctgataatgtattttagaaaggggaactcaagaaaaatcccaccaagccatttccacttattaagtaggacttttaattgaggattagctctaggttaaattaatcaatttgttgtagcaatttattagttattcaattaaaggctaggaaggggaaactttagggtgtgacagtcgacgacttggacgtagaagttaatccaccaatatcgttgaacctcattagctagctagtcgccctatggactgtgcgagatgtccagttggggtatctaggttatattagggtgcattttaggttttgatgttattaattaccacaacacttctccacaacatcacaaacagaaccaaccatgactaggctgccgttccactcaagttacctagtgtgctgggtctatatccattcgggaaatgtggtcgtactctatttgttttctggatagtttcttgactcggtccttataactgaccagcgttgcaaacaaattcgaaagcagctagctagagagactctttgcggcacagaagactagccaatacgtctttcatatccaattcgactgtagctaggcatgggtggccctaggaatcccactatcatgctctcccttgtcagaagtactatgtttcaatatttctccgcacaggcaggaagtttgccgcaacggacttgtagcagttcagcaagcagcgtcgtgttgagacattggcgtgcagctcaatcatacatgttgattacgttcgccgctcttttgccacccctcactgctgcacgttggaacgatgatgttgttagaactcttgcaagaaggtacattaattttcgcgagctgcgcagattgacaacgaacacggcctgtgtatgccatacacgtcaagaacgcctggcggtttacacttgtctcattcttttagattgtgtctcgttgttacaaaatttgaaggtaatttctcaagagaccggatatcaccaaaaagctagctttctcccgctgagattattttcacgacaaggaaatggagggtcatccaaaattatacaagattgtcacattgtagctttaaattattttttttcatgatggataattaatctgtataccttggcgttattctctgtccaacacctacatcgtcaattatagttgtttaaagaaattaactttgactgatgttcactcggtggagagtcaacataaataggcacctcgctttagcttgtcttcacaatgaagttgaagctattgagctcttatatactaggaaaaagtacgaattactccccaaactattgtggtagtacgatttaccccccctaaactacaataccggacatttgacaccccaaactcttaaaacttgataaattaccaccctaactcgattcgaagcggttttcagcctacgtggcgatacagtcagcaaaaacaaataaaaataggtggggcctacctatcagcgcttttttctctcctccttctctgccccccctctctctctgtgaatagaagtggcgatacacgccggctctgatggtaacggcagcgacgagggcggcgggacgaggagcgaggcggcggcggagacggcagcgggatcctccttccccaccatcatggcggcgcggagctcggacatgccggagagggcgaaggcagctgctggcggcaggctggtcgcccgacgaggacgcggcatactacacgccggggcagtgctcggccggctccgatggccacagcggtggcagtggcaagggcggtgggatgtggagcgaggcggcggtagagacggcggtagagacggcggcgggatcctccttccccaccatcgcagcggcgcagagctcgggcacagcggagttgaagaaattggacacgctagcgctgctgcagccacccccttccccttccctttcctacgccctccccgcaacgctgcctccatcatcctccttggcgtgtcccaccggctgctgcctccaacgccctcaccaagctcgagatggtgatggcgcccgggcaacgcacgcagcagcgttgctgctcgccgccctagcccggcggcttcccctcatgccgcctccgccgctatctcccccaacgacctgccgccgccgccgctgccattctggcttttcgtgagagggagagagcgagagacatgtggagagagatggagatggaagggaaaggaggtgggagaagagatagaggagctgaccggtggagtccacttatttttaattattttttagttgagtagaccaccacgtgtatgccacgtaagatcaaaactgctctggattgtgctaggggttattcatctggtttgaaaagttctaggtataaaatgtttgcaactgtggttaggggggtaattcggtcaaccatgataatttggggggtaatttgtactttttcctatatactactctctctgtgttttttttaatacacaacgccgttaattttttgagatatgttttaccatttgtcttgttcaaaaattttatataattatcatttattttactatgacttaatttattatcaagttttctttaagcatgacttaaatatttttatattagcataaaaaattaaataagacagttagacgttggttaaaatgtcaacggcgtcatagtatataaaaaacggagatagtacgtcattgtacaaaaaaaagacatacattaataattatggcagagttactgtgccattatatatagcagtcctcatatataagagatcaaattcagtgaaactttgagttttaccgcatggctattttagtgctgtcctcggcacgagaactactgcagttgatttacttggaaagtaaatattctacaattgcaaaaaaagaaagaagtccacagggaaaaaacccacacacacacacatcttcactttgctggggatttggagttttggattgtgggattgagagtaatcgggaaataattggtgacgggttcgcaagctcgtagattcagagtatccctttctacacacaggacaagctaatggggcttaacttttcttggccgtgcacaacaacgacgagagcgtataataacaagatcgacgacacctctctaggatgcttcgacatccaaggcttcttggctctccggtccgtgctgcgatcctcatcagctgaaggctccacagggtgtctaaacaggtgatcttcatcgtgcgaatgcgcaagtactttgatggtgttttgtaaaccaacagttcgcagcagccttcgacaaaatatttgattgtatacgatggtttctttccatcaagaatgtaccaaacttttctagtgtaatcgttagtgtctctccgtagttcggacactttttaatgtcagggtaataatttagcacgaaaaagcgtggtagttcttgatctctggaaagaccctcgtgtaatttatgtacgtgtttgcatgaaaatatttgttaactacatggctcgtcgtggtttgctgcagaatatataatgaatatattttaaatgttgcataagcgatggatggatttggattaaaatattttgaaaagatttgtgcttctatgctctttaaagaaaaatctgcatggattttaaatgatatgagaggcccagattagatggtaattaacagcctaaaactttttatcaagggtaattttgtctcaagcccgcatgcattcattcagtcacggcccttcatcctctctctcgttcttctccgcctccgatgctagcccgcccacgtaggactagcatggttttaaatctcccgctatagctgccgctatctcccgctatagctgttttagaaaggttctagctatttactctcatgtataatttagccgttatagctccatttagcccgctatagctgtttgacaagctaaccgctaaataccttagtccgctttttaaaacattgaggcctaggcgcctagcatatcagttgtggctccttattgtttcttgaatattagtggcaggctatcagcggccatggcgcaattttgctgccaagatcagtgacataagccgtcgccatgctccatataaatgaaaagctaatgaactcattgatgcttgcttctcgatcacatggtgcagtgccaacaatagctggatgattgtaagcgagagaatgattggagtttgggatgctcaacggccaagtttttgtagcgcgatagatccaaatgccatatggccaggcaccaggtgttcatcattgtgacggcggcgagcaggaaacagttgccgaagctttgatgtgggattcggactgataggatcagagattaaaactccctcatgcacgaaataatcctttataaatgatgtttatgctgttaactaacttttaatctgggtttctcattttctttaaaatctgtgcggttttttctttgaacatcatagatcacatctcttttggaaatgatttaagagcgatgatttagtacgtatatcatcacaggtgggctggtggttgaaaaaattttctccccctagaaaaatagaagtacctcatctacaaaattgtttttccagtagttaactgctccctccatctcaaaatataagcatttttagcatagtgataagtcaaacatttttaacttaaaatattaatagcaaaaaaattaaaaaaatcaatcatgtagaattgatgttactagatttatcattaaacaaactatcataatatgcaactctttttatttaaagcatcttatttttatagatattattggtcaaagtgatatctcggaggctgtgtcaggataaaaatgcttatattttaggacggagggagtactccctccgttccaaaatataaggcacaaccacccttaacccaaagactaagaaataattattatcatctcctagtttgaatcatcctaataaatataatgcatgcatccaatagaattagagatcttgatggtggaggatttaaaaaaatcataattaattatatgcatgcatgcatgccttatattatgaaacatctaaaaaaaagtagctgtgccttatattatagaacggagggagtattagagcaagttcaatagtatagccaactgctagctccaattcatctatagccaatctaatagctcattcatacaatagttacatactacactattaatacctagtcccacctgtgatagaaacactgcgtcttggagtccttgctacagctggctacaaatctgtaacccgttgctcttctctctcctgatttatcttcttaaaatatgtttgcagctgacttatagcctgctattgtacctgctcttagttaatgctgacacaatggacagcaggaaaaacatggaacagagagatctagagagcgcaccaaccaaagggcgtttacgagatagcagaacaaagagagtaggcacattaattcacgagcgaaagagtgcaaaccagagcacacagctacgtacacacatatctcaagcaccatctaactttcttctagatcatatgggcatggaaggcactgggaatgaaaacccctcctccgatgatcaattcagggcaaatttgctgttctctcgcggccatcagccgtggcatggcggacgcactgtacacagatggagggacagccagagaacaagattggcatccgtgcactacgccggtgtttggtcttggacgccgccgtgcttatccgtgaattcttctatcacgacgaactccggtgatgggaacttgggaagacgagcatcgataattaatttcttatcccattaaaattgtacttagaattggcacgcaccagaacaaggattagccagcagtggctagagtagctaaactcatgcgtgttgaatagttccacattggttgtggaaggttaaagaaccaaagatataagtgggggagcctcccacctcaacagctagcttttgggatgggaaaggccctttacgatcctacaattggtatcagagcctggctagtttaacatctctggcccgatggaccgtgggtacctgcggggcccgtatacctgatggaccgtaggctggtggggcccggatacggtgaagggctgagggacaccaaattggtgtgaagggagagattgttgaatagtcccacattggttgtggaagggcagatcctacactgcgagctggaccacgagtaaatgcattcattcacattgatcagtgctgacgtgcactttgaacgcatgcagtctgtttttgtttttgtttttttttactggtaccctggtcccattgtttagaaatttgaacttaataattaactctcaattaaaagaaatttcacaagagctttcacttggaatagtatatatgtaggcttcgaaattttaaatttctggtggaggcatgcacttataattggcagatgccacatgctcacacatatacatcttctattagttgtctcacactttttggtcacacatacatgctgagtcagcctattaaaaatgccagcagcaaaatatggatcaagatagcaaaatgggttgcgagctagcataaggagagaggacaaagaacagatcactttatcacatatatattcagtataagcatatatgcatacaacatgtcaactagcccctgagtcataacaacattctttttcctgatcgtgagaatggaaggtaactggaatcctggtgtccgctcctaggacctattcatgaggtgaagatacactgaaggggaaggccacgttagtcccggttcgtaagagatccgagagatttacaattttcactgactggttcttcattagtgatatgggcatagatctttgccatgcatcatcagaacaactgcgcagtaagggctatatgcagagaatgctaagggacaggatatccataaaatacaagtacaatgtatgtattagaaagagtaaattgcactagcggttcttaaacttgtaacgaggtttcacttaggtacacgaacttacaaagcgtgcatcaaggtccctaaacctggtttaatgtatcattctggtccaaagcctcgtttgactgtggtcttacctatgtggcataccacgtgggtgatgacatggcacaaattttactttccctttttttctctccttcctccacctctggatgcattcatggcaggcaaaggaagagagggagagactgtgcctaccaccggaggcagaggcgccactgccgaagtctgctcgtcgtcggagcagaggctggggggacaacgacaacaccaacggcagtggcggggctcggtctttgcctccaactcaagcgttgagaatgagtggcattgggtgacaacgaaaatggcgcggagacagtgacaacgagcggtgtggtggctccccaatgagatcacactcccccatgcaaagctcgtcaccgccaatctagtcatcccccatcacacagagctcaccgccatcgatcacatcgacctatgcagcgtggagctcatcgccctccaccgcacggagctcatcacccttcacttcaccggcagacttgcccactgaggtcgcgaccgaatccaacaaaattacggctggatccggcgagctcgttatcctcatcaccgttgcggtcccccaaccatcgtgaggagaggaaagagagcttcagctcattttcctctgccttacagagctcgctactgccaatcacgtcaacctccactgtacggaactcatcgcctctactggccgacctacccgccgaggttgtgaccggatccagcaagattgcggccggatccggtgagctcgctatccttgtcgccgctgtggtcccccgaccgtcgtgaggagaggggagagctcgacactaccagtaccgtcgccctccacctgggtgtttgtcgaggaagggagaggcgacctgatctgcagagagagagagagagagaggccacaccaccggggatgggagaggcggcgctgccgcctgcggtgagcggagtaggaggagaggcatcggtggcgtttggccctctgctggcgttggggagaaaaggtggtggggaggggatgagggtggaagaagggagacattattttttttttcaaaattacatgtcattgtccacgtgtcatgtcatgtaggcaagattacagtcaaatgagactttggatcgggatgatacattaaaccaattttagggatctcgatacgcgttttgtaagttcgtggatctaagtgaaagctcagtttaagaaccgctagtgcaatttactctatcagaaattactacgcaaatctttcatgaatctggctttatgtgctgtgaaactcggtttgggaagagcagcagcattgtgaaatgaaaggtttttcatccagcttttttctgcagaggagtgcggccaagaatcttcaaggtgcaaaatgtgtagagcaaatcatttacatgtgtaccctatacacaagttaatttataaaacggcattgtacaagcggttttgttttcgccaccaccattaggtttccttcactagccattttatgctagaattgatcaagcatttgtgtgagagcacttccattcttttgtttggacagtaaaagtgcaacatactacaccactatattatacaccatttctaatatgtacaaatatgtaataagtgcgggcaactataaggtgatgctggttagttggcagtactaaatatctattgtcccaaattgaaggatgagttaaagactagtgaggatgactaactgctgcagcctacaaataggtgagaaaaatagtgttattttgcttggtttgagaggaccaatacacatgtgccctgtggtagctgatcttgcgatctattgaagatacatatccagaattacggccagaagagttttgaataccattggatcgcatctttctacttgcctcgatcctccatatatacatatactcctcgagctaattacactctttatcatgaggacgtcgggaagcctcgtcgtttgaagcaatctcatgaaacggatgcgtgcacacaacaattaattaattgtgatctgctgtagaatctagcatacatccatgtaaaattggatggctcgatcgatcggatggaatttgtactgcttgtgtagtgcatatatatatatatatatatatatatatatatatatatatatatatatatatatcctattacaattaagttgcgtgctggaaaattctttttgagcaatgaggtgcacactaatgcatccctgttttctctctaacaatgacaaaattttggacatccaagtcaaagcaaatttaatactcctagcaaattttgctgggatcaaaagcataacaaaatttgtggttatcaaagtcatgaaaaatttaacaaggtcttacccaatttggaggggatttgaaagcatctaaaaatttaagatttagtaaaatcaattgcgcttattaaaaaatatagaccaaaactatttttcattgggggagatggttttttcatccctcgaaggaatatcctatactattcaacatcccctcatatcttacatgcgtttaaatagttataaaaattaagaaaaaataacaagatagtggaatattagatatatcactaaaaaaacatacaaggtcaaatttagaacctacaagttataataaaagaaaattaattaaaattagttgatgtaaattcacagttatatttgttagaacttgtagaagtcgaatttaagcttacatgtttgcatagtgatatatctcatattaacctatcttatcaattttttcaaaaagctttaataactatttaggtaacataacaaaataagtggatatcacctcaagacataaaacaatctcccggtacagtgcgtgggatttgctgaaactgtgatagcctattaccagagacagctcataattggcaataactgcacaaaacgggaaaattaaagaactctctgatgatctgaactaagctccccactttccacaaacacatgaagtacgtataactacctttgatggagttttgagtacgtctttagttaatgacatgtgcggagtatatgctagttgcacaaaggagaaaagagcaggggagctgagtagctgtgtgtggttggctggttgcaaagaataatataccaacaactatatactacaaccttatcgggtatatatatatatagcttgcccgagcactagagcacgcacagtccagccccctctactataaggcaaaattccgcatgcgctctatgttgaaataatccatattcttgtgtgctgcaatgaagaaaacaaaggaatgttccatttccaattcaattgtaggcatgggtggcactagaaatcctgttgactcgatctgtgtaaaactagttacccatgccacatgagctgttgatatcatgaatctagatcagtcaacaaggtggatctactgcacaagatgtacggcagaagttggcatggtatacttgtgtaagaatgaggctactattctaccgttcttgttcagcgcttaatttgggatttttttttaaagtacccatggatcaatgtgggccgttcaaggatgggatccaacggaggatgtacgttgctactgcacctagtgtaacagggtgcaggagtgtagtagaatggtaattctggaagaaaaaattgttgtgacatttttgaaaatttaggtttggcagagggtgtgatttgttcttgggtctataaaaatgcagtccacttatgaaataaaaagaaaaataattaatcaatagctttagatcgtgatttttgaaccctacacccatcactggcaccgccgctgctcccatcaggccatcactgctgtgccacctccggaggcagcacgctcgtcggattcttttcccttccggccgtactgctttttcttgaggttgttttttctatgaaactttcttcaggtcatgccagagttcagaaattcagacttctgatttgaggcatggttgacgcctggcttacacaaattctactaccgtcaaccatgagggcacattaaagattcagatttaattattttgcgggatcattaatactttcgttaatgaaagagttaattaaactgaaagcacagttgcagaaaataattaaggtttagatcccttgtgattagttagcagaatcgcaggaaacaaataagtttcagaatcttcaggttttgtttgcgactagtcaagataatcaattggtatattatgaagactgaatttcatagcttttgaggattatccatcatgaagctgcgagcaaaacatgtatgttcaagatcagcacttgatgccgcaattctggatatattaaaatcaacacttcatgccgggcgcaaggagagcgagagggggcgccggcgcgcgggcgcattaggtcgacgggtggcagcgcggcgtcaggaggcggacggggcgagtggtgtcgagtgttggcttgcgcaaggatgcgcaccggctgttggcagtgaaaggacggcgcacatcggggttggaagtgaaaggggtgaacggcgaacaggcggcggcgcgtgcccgtgctcgccgtgcgccgtgcccgacgaattggccatgggaacgattgactgatgtttgagccgtcctccttacggcctgtttggcaagagaaggggagaggaatgggagtttcaagagggagttgatggtgggattggtcataggagttatatttttagtcctcttccattgtttggtttcacatcgaattccctacaagtctcacgaattaacaggcctcccccaggtaagagattagtggcccgtttagttggagtgagtttttgggagggactaggagtttagagggacgaggctattaattgttctgtttggttgggagacatgggaattttggtgggacggggatggggaattgaggaaggaactccctccttttcaatatctaggtaggggcaggtaattgggagggaattcctcctttactttttctaagcaaatctcagccatccgtttttattaatgacctaatctccaaataaactccctatgaatttccatcacctctaccaaacaagatattgggattaaaaatcaaattcccatcttaatctcatcatcaattccctcgtgtaaactctcaatccccttccctcgagttaccaaacaagccgtggtgggaattggacctcttaattccctatcccaaaccccctcgaatttccaagtcttccaaccaaattatagacttaaactcccagatatcataaactcccattcccatcactaactccctccaaccaaacaggctcttagggcctgccaatgattacttaattgccctttcacctaatttaaacaaatgactaaattgaccatcgaaatcagcggcgatatttattcctactacactactaccacctcctagtggaaggtactataaaaggcctcttgatatggcctatttggactttctaccactctgattactccgataaatttggttcacccttttctagcaaagtttttctacattgagcgggttcctctttctgtgtattagagaacataatggttgggatgacttgatgctttcgtatgaaaaagaaaacatagatatgggaaagctgattggaatttaaggccgtaacaaataggatatgtctttctctccataagccaaattacaaattcgccagttaatgatcagcatattaaaactttatctggaggcagagtctttttactgcaactgtggtatcaagaggcagctatctagccatgaccatctcaattcatgtacctctcatactactcccaatggtcctaaattgattggccattttataactacttcctccgtttcacaatgtaaggcattctagcatttcccacattcatattgatgttaatgaatctagatagatatatatgtctagattcattaacattaatatgaatatgagaaatgctagaatgacttacattgtgaaacggagggagtatcattcatgaagtacattattttacatagaaaatcttcctctgttctccatgtcaccctaaaatctaaatataacgctaaaaaaatatcatgagtgacaaatctctatgcaaccctctaatcctacattgacaaatctccaacatagcaaacgtcacactattgctcaggtagagtgcgcaaattatcagcagctaccacacatgcatatgcacacatgcctggcaaatgataagttccttttttaattttaattagtccatgctcagccaaacatgggcatgaaaggcaccggggatgaaagctcctcctcgtgtgacctattcacggcaatagagatgttttttcccattcctctatggtgttctgctgctgttctcactgtttgcagaacaccatataggcatctctgaatggctgctttatgctttgatcggctcagccttgggcatcgccatgcatgcctgtgaattctaccaccatgaaaaatattggggactagaagaacagtaatgctatagcatggttgcatatgtccgttagatttttactaggaattggttggctccaggatgagcagtggcaagaaaaggctgcattcgagcacgctgaccaggtggaacaatgaacatggtttcggtttgtacacttgtatgacatcaagaacaggtgggacttttatgattttcaatttagattaggtttctccacatcgggccttgttcagtttggaggggatttatggagattaaggagaattattccacaccacaataggtgtcagataaatcccttcaataccctcctcttggggattaacaaaacagtgcctcagggactgttttcgtggaaaaaaaatgaaaggaaaagttgggccatggatacttaaacgattttcacattggtatgtacactttacatttttaaattttgtatggaacatacacattggtggtactctccattagaacttacatggggcatgcatatacttctgagttaagcggagcaagttacttataactagcaattgccacaaatacatcttcattgatgtgatacttcgatccctcgattggtagagagtctacctactttgcttttatttaaaacgccagtaccaaatatatatgtatcaagaaaacacaaaaagaccgggttgtgagaatgtgaggtagtgcataaagccatagaacaaagagtagtacacacacacaccaaatctgctcatgagaccctgagccactacattcttttcctgattgtgggaataggaggtaacaagaatacaaatatcaacttcagtgttcaatgccgggaatgcggatcgacctggtatctatcaagtacaagtgcatcatgtctaatggctgcagagaacttccctgtggttttgcacactgtatggcatgtccacggacgccgcacgacagatcgagcacggtgtgctgagctcacggccactgctatgtccgctcaacgctgtgcccacctgcagtgcacttgtggctgcctcttggatacgcgttcgtccggacagaccggacaatactcttgctccgttgattctatagttgtatggtttcattttgttgcccatgccaatggagttttctacgcgcaagaacagcttgttaggttataagactgaatcccttggtgatgacggtttgtgcgagttgttggatatttggcgtgagatgcagagactcaacggatgtcatttcccacatagcattcggcaacccagctactgtgaaatgaggagaatcttcctgcaggagtgaccaattcaagctgagggcatttaatttggattgggctaacataacctgaatctatgaatggtaatgacacattttttaaacaatttgcttgtacgataggatagtatttttttggaactatttctcattgatggcaaaacataaaatgtccgtatctttttcatgggactaaaacacgacatcatcatgggacctcctaacatgcatctttcattttttcagaagaagtatctattgtatatttttgttagaatccaccaccctgatctctcctctctaaaattgagttatgagcatttagcagttttgagacagcactgataagtcatttgtaaattgtttcctcaaattaagtagctagtacattgtgttagaatagataagttgttagtttgtagagataagattgatattatcacgtgtaaccttttatccttatctctataatccggattgatctcagggttgttgagatcggtccatcatctctgtacaagccacgacaggggcttttcctgcctatataaacaaaggtgcggccccctaaccagggtttaacgcttcccaatcaatctagcttctccacacattgaactaaaaaaaaagtagagcaatttaccaatatgcaaccagtacattgaggaaattaatttcaaggatataatccaagatgggagtgtaccgatcccacagctagcagcaacagtgggggcaaagttatagggcatccagcaagtataatccacactccacactaatgcatcgatcgtgtttgctctgccaaccatgagtccatgagagatagcgcactagaaactagagaattgtcccatgcaacgttgtgtggggttaggtcaaagtgaattggagttgatatgcaactctttatatttctttattttattaataaaattgtaatttacatataatatatttatatatcatcaagttcatgtttacaatgagtattttgggcggcaattaaatcaaagcgaagcttgccgttattaattagcctataactatggcgctgcatatagcacctagctagcatttgatggacatatcacagacttgacggagatgtgtgttgcaaactacaagttctaattcatgtcaacacgagaaaatgttgtataaattggaattcaaaattcagctcaggctcgatatttagtccatgtgtgccctctaaagttgatatatatatatatatatatatatatatatgagcatttaccattttgtgctggcagcaatagctggtaaattgaacccaaaatagaggaacgaaaggatcaatgggccttaaaagcaaccactaagctaaaaattcggaggatatgatgggagttgggagcatcgatcgatccgaggcgagttgcggcaaattcagaatccgtccagaaaatgttgtccacatctgtgtgcattaatcatgtgcatgcatgctccataggacggggaggtatcaggattttagagcaagggcagaggagagaacactgtgttggtcggtgcagccaatgtgagagccgaggacagcgtcgtgctcagttgctcgcgccacagagtgggcagtcactcgaccttcatggttcaacaaagagctaaactgggtgcacaacgacaaaccggtagattgcgaccaaattggcattccagcgatgcatatggcatccaagagttgttcgggcagcgctgtccatagtgagattatgagctgagaaaagaaaacgcgaatgctgtcgattcctaatggacactcgattgtaacattcacaataaaacttggaatgaagcggagactggttcaaagttaatctttatacatggtttgaactcctagtctcctacaccacacatccgcattacgtattgaagaaagaaaaaaaattgaaaatataccttgtttccgatgattttataagaatatacacgtttagaaggggatgacataaatataccattatcacagaattgaagtgaaagaccgggaggcgagtgcgcgataccgcggtctcgtgaggcgagcccgtgagaccacacaaactcgcgctattaataaattaattaacatcattagcaatgtattaattaatgttattagtatcactaattagtatgattagttgtgttattagctgccggtgtggccatctcgctcggccatcaaacgagaccgaggctcaatagccctgtcgctcggcgaactagcgacaccgaggccgaacatgcattttcaccttgtgagaccgccatgtcatcacccttcgtcatgtatcacccgaggccgatcttgcattttcaccttgggagaccacccgtgtcatcaccctttcatcagtatcacgcgtttgtcttgcgatttcgtcacgatttcgcactgccgaaccgcgacgacagtttatttgtggtttattttcacattcaataatgaagtgccgttgataaagagagcaagttatccgcagctgcctctcacacacatattgttgtattttcaacaattaggatttaattaatatgaaagaatggtgctagtagatatctgtataggtgaaagcaagctttctggaaggaggatgtgccacgtcgttgaagaaatatataccgtctgatttctactccgcgagtttcaggctgttaaatcgtatagttggcgaaatatcgttttgtcccattgagaatcttctatttgtttttagtcctttcatgtctcttggagaaaaagttagcaattttcattttaccccagatgctctggtgcgccaccgacatcgcctctcattctcgcgctgttggcaccacctccttttcccgtcacccctcgctgcctcgtctccttctcgggggcgctgatgggcgatcagccgtgcgcccacgcggtcagtcgccctcctgatctagtctctcctctacgtacctatatatttatgtatgaagtttatacgtatgtatataaagtatatacataatacatatacaatataagtatagttttttatgtgtatacaattttaatttataaaacaaaatatatacacctatacaaagtttgtatacgtacgtatgcaaaatttacatgtacatatacaaacattacatacacacgtgtacactttaatgtataaaaaatatatacacgtgtataaagtttgtattgtataagtgcatattgaaaaaggggaaaaaaccacatatagaaaccttgtatacatatgtatacaaactttgtatatatacatattagaaaggaaagaaatcaagaaaaaaaagggaaaaaacaaaaaaagaaaaaaaaaggaaaaaggggaaggagatgcgcacgggatccccctttccctctacgtatgctccacacggttgcgccgccgggagggggggggggggcgcaagcggctgccagttagggatttcgctagttctccccgtcttagttggccatgaaaaatgctttcacattgttgtattttctaaataatttgtagaaatatatagttaaaaagtaacgatgagatatttgcactgtaaactatattgatgtcaaaagagctagcagaatgtcgagtagagggtagtcgaggtcacaatattgaaagagtgcaaaccagagcacctacactatgcagatatgtctagcacaccgtgttcgtttccagatcatatgggcatggaaggcactaggaataaacacccctccttcagcgacatggtcactacaacgctatagttccgtcccatacatcagctgttgctgtgtcgatgcccagtgtacagatggatggagaggccgcagaacaccagatgggcagtatgcaacagctgcctattgcttaatttgttccggccttgggtgtttctgtgggcatccatgaatttcacgatcgcggcgaaatttgcagatggggtgatcaacatggtgatgtcacggcttcttacccatgtaaatttgtgctgggaatcagcagatctgagcatgagaggtggtaattaagtacgagctggattcatgtgagctggcatgtttggacgacgggcatggtttgtgtatgctgtcaatcagggccggccctggaggggggtgagcggtgcggccgctctgggcccccgactcgtaggggcccctctccacccgccacccctctctcgcccaacagaaacagatgtatgcggatggtaggttcccgagaatcccgacgccatcaacgcgatcacattcacgcccaaccgccgctcacgcctcacgtcctcacgcgagatcgcggccgctggcaccaacgccgtcgcaacaccgcagccatctcgtccgaggccgccgtccgctggccgttttcacgcacttcctcttccgccgcggccacgcgacgcccatgcgaggccgaggtgccgaggcgcagccgccgagccgcgcaggtttcttgccgttgccgtcgctcattgttttgtacttctactgatgcctgattgatgtcttgttgttgctgatttgctgaatcactgcgacgatcactgattcacttcactgatctagacagcagcagcaacaccattgccatatgaaaatttgtaactatgattcctatctgtaaattgtaatcggctgcttgttggctgttgctaattcagttggacgagtgttggatgaaccgacaaaggaattagcaacagccaacaagccaacaagccaacaagccaataaatattgtaatgtaattatagtataaatacatccttaaaatttgatcacaagtaatatgcactacattataaatatggatagccccttctgtttttatacttttgccagaattaaactgctctgcgttatgctcgattgaaaaagaaactctggagaaaaaaaatgtcaaactagaaaagctcgtgatcaacttgagggcgttaaaatacatatgtggatcataaaaacaacaaaatatctttgtgtccgtcgtccagtatgttcttttccaggttatgggcatggaaggcatcaggaatgaagacctcttctcttgcgacctatccaacactgctgagaaaaccctatatagtcctggtttgcatccctctacattgccgggttacaaatcgggaccccgaatcagggactaaacatggctctctttagtccccgatgaaataaccggtactaaagatccatatgtaacaccaacttggactatgagatcataaagtcccgttgcactttttaaccggaactaaaaataatctttagtcccgatttctattcaaattggaactaatgtagtttttacatcacccagcaaagatcggttattcagtagtgcaacaacgatcatatagcagcagaatagtacatgaggggcatcagtatacgactacactatggttcgatttggtcttggtcgctgcattttgcaagctcactttcctggtgacgacaacagcttgtctgcttgtgtacatgttttacgtcaaaaatatttaggcaaaagaccgaaaatgtaaaccgttttcattataaaaaaagtcaagaacatctgtggaggtctatctttgtccaatttagattatatgcatagttggaattgatccattgcacggtctattatttccttcgatgaagtatgcgttttcactagtacctgaccggcataattgttcagaaatttgaatgatttctcaagagaagaaacaccgccaatagctttctcccgcgcgctgagattatttccgtgagcaggaaggaatagaagagtatcacatccgtatatgcagctttaaaattttaattattttatgaagaatatgaccccaagaaaatacaaaaacctgaccatcagtaaacacaataactcgcagcaatacattattaagaaacacaatacaaacataaacattcacaatatgcgcaaatatactcatatgaatacatatttaatatcggtttaataattaacctgcactgatggtttatgtggtggtgatcgaacacgggaaaaaagaccttccgtacgtatagatctgaactatcacgaatatatgcatcaaaacgtttcatgtaaccttgtctaactggagtttttaatcatctctatttgatggacctgtgccaaatggtgccaattagtatgcgcatgcgcactggggagtgatggagagtagccaaacagctgcatggacggagagaattaataaaccaactaatactaaaacctttaatatatgacgtcgatcgtttagtttaaaattgaatgaaactccataaaaaaaatcggagggagtatatatttcacatacaaggccgagcagcggaacgcacacaaaatctagacccttcatgtacaaggaaaatttgcttgctctaagttcagttaatccataacctcctcattctctcatacaaataagaaccaagacgtatgttccatgcccaattctatcgtatgtaggcatgggtggcactagaaatcccgttcactctgctttggtcactgcgtgttggtgtggatgcgtatctcgaattttccggtgctcatagaacatgtgttaccacggattcagagcagttcacgatgtagtgggcgacattgcggatctacaaatatgttggtgcatgcatgctgccttggctctactggctctcgtgtctcgttgcgccgagtgttttggttcgtttttttttaacgagatagtgctctgtggaatggtgtgcccccttttatgtaaattaggagcacaatattttctccaatccttaaagagatatatatctctctgttatttgaaagttgaaatatttaaatcggttgaactgattagaaaacaaatttgtaattatcaatgttgagactttcactactacaaaaaccatttttgcaaacggaccaaatcgtctgcgaaaatgcaaatctttgcatgcggccagggcacctgcatgcgaaaatccggattttcgcatgcggacgcttaagcaaagagaaaaaatcgagagaaaaaaataaaattccaaaaattaaaaaaacgaaaaaaaaacctagcgccgccacccgccagagctcgtcgcagccgccgcttccattcccgtcgccgccgtcggcagccgcccgagaccaccgccgccaccagccgagaccgtcgccgctcgagaccgtcgttgccaccgccgcccctagatccgccgccgagcaccgagctccaccgtagggcagcggatccggccctcccgtggacggcgccgccggatccgccgctcccagatccgccggcgtcgtccgtcgccgtgcccgccgcccgccactgagctccgagctcctccctacggcggcggatctggccctcccgaggacggcgccgccggatccgccgccgcaggccatcgccatgcacgccgcccgccgtcgagcgccgagctcctccctagagcgatggatccggccctcccgagtacggcgccgccagatccgctgccctcgccgcctgccgacgccatcgccttgcacccatgcctgctgccggcgagaagaaagagagaggagaggagaggagagagagagagggagagagaggagataaagaaagagaaaaataaatgggtggttgaaaaattttgaaatggtgaggagggaaagagagagaggaggactaaaaaaatgcgggcatttttacatgcggaccacctaaccgtcccatgcgaaaatagatttttgcatgtggctatttaagaggaccgcatgcaaaaataattattaaaaatattaatttggtattaaatgaactttgagtcgaattttaagatgctaaatgaactcatgcgaaaaagttatcaaaagcaaagttgtacaactcattgagatctaccatttttcttttggtcatttcgccatccgagtttgattagactatataaaatttgaattttaaaatataagaaattcaaataattttttgggtagtaaatgatttgaaatgaaaaaaattgtctaaaaaaatgttgtataacttatcaagatctacaacttttgtattagttatttttatatatgactttgtttgaacagtttgaatatgattttcaaattatgacaacttcaaacaacattttcaaatactaaatgatttcatctgaaaaagttatcaataacaaagtcatcaataacaaatcatgctctatcatttacaaagtcatcaataacaaatcatgctgtatcacattttgtgaacaatcttacaaatcactttgtcggatgaagaaatgtccaaaatagaagttatagatcttgatgagttatacaactttgttattgatgacttttttagataaaatcatttcctgcttcaaaatattatttgaagttttaaaattcaaatttttaattgataaaataaagtcacaagaaaaaatagccaaaataataccaataagaacacaataatatgatagagcatgattttagaaacatttagaaagaaaatcatccaatttggagttcatatgagtgagatacactagtttccaatttttcaaaattttcaaattttattttcgcatatggcttctcaagtggcttggattttttcatacgggccacttaagcagccgtatgggaaaaatgaccctcgatttttacagacgccactagttatggtccatttgcaaaatttatgaggtctcgtaaaaaaaatcacttttctggtagcgtttgtcttcgttggatgtacttcatccgtttctttggatgtactttcaaattaggtcgagtgttagataggtaattatgtagttgttcctgctagttgatggcggcggcggcgacaacgcgtatgtcgtcttcctctctctcgtcgagggcgcaatcctggccagcctccggggtggcggcgcgggtgacgacgagctccagctctgcatcgagagcgcgcgacgacgcggtctcgccagcgacagggagagcagatcccggcgtgcagcaggtggcggaccgtgcggacagttctaccatgagggcgaccaaaggggaggtcgagtcgaggtcatcgacgacgtatctgcgagtccacgtgctctgatctcctcgtgctccctccagatgtgcaccggcttcgtcgctcctcgtcaccacctcctggttctgaatcctcgtggcaatcttgctgggatagcgggaggtccaatcatcgccacttcgcagccatcgtggtcgttgtcctcacatcctcacccgtcggctggcatttttcttcttttttttttgtcaaatgagcgtgttgtaaatattttattcgtggtaattcttttacatgtatagatcgatatttagtgtatcaatacgtggtaaaaatatgttgatcgtcattccggatatgaaactccagtagcaaaagtattactacggtattattactggatgggagtaaagtttcaactgcaaacattattactactatggtctggcaaccaatgggtgagtaattcttttaccgatggagtcgatggataattcttttagtaatttatttactctccaatcttttataagatccgtctctctcggttagtgttagtaatttatttactatatatgtttataagactgatctcttgccatgcgtaaaattaggctagcaatttttatttactccgcttaataagactgatctatctattgaagccagtattttgtttaatccatttttgtttatttgtaagatagctgagtgtacggatttgaagctcataatacatagtaactcatttactaaatatgaaatatgagatgaaaaggtgggtggtaatggaatttattccttgagataatgagatggatggtaacggaaaaagaagggaaaagtgaaagggatgagacgtgaagttagtaggaacggaaaaatagagaagtgggtggcatggaaaaatcgaaaggggtgaggaagaaaaaaaaaagaggaaaataggagatcaggtgtggcgctcgaactactatttcaagcgctgcgcgcgtattagcctaccgttaattagctgtatcttatggagaaagtcagcttactgaaataatgtgaagataataatgtacgtagaaggatttattttttcccctttgatgtttgtcaatataaattagtcaagggagataactgctgaatatatgctaatctcatttgtgttcagttgacaagcaaatctaacgagacagttgtgtgtaacatgtttacgctgcaaccctatataaaaacgtcagaaaaagaaaaatgttccaaagcagctagctagctaaagagtaaacagtctgcagcaacaaggactaaccaacatactcatatatatcctccttccaatcatagaaaaaccccaacatctgataggaaattcggacaaacgattatccaaatatattcttagaaatggattcattttgaatggaggatgtacctgttccatatacaatttgactacataggagtggaaggcaccggaaatccagctgtggcctatctcccagattactcctggatgtgttcatccagtacgctatcatgggtgctatgcagtacacagagcagaaagcaggcgccatacgagatctttttggctggaaagccaacagagatgggcgtgcatcaattgcccgctgtttcgtccaccatgttgtgttatcctctaaagttgtctccccgagtttccctcttctgtgaaataaacacacagtcttaatattactggtatagcctatatagattgcctgcataatgtcatgtcatgccaagtatttggatcgcacatattcttttttttagggggagatgttgaaataaaagttgtctcttaaatttccatgtacgtatattgacacatgagtcgtggctacatttggccaaactatttgccacaataagggtgaatttaaggagaaggtgatcgaggagattgggaagatacgtaaaacgaggtgagccattagctcatgattaattgagtattaattattttaaattttaaaaatggattaatatgattttttaaagcaacttttctataggaaatttttacaaaaaacacaccgtttagtagtttggaaagcgtgcgcgtggaaaacgagctgttatctccctcaatgttacccgaacgaacgcagtctaagtgtaggcagtagtattacatttgtgtttatctttttttttcccttgtagagaggaagtgtgttcatcggatgaacgataataacttttctgattaaagaaattataaaacacgaaaaaaatgcaacgtgcatagcttttcttgacataaaaaatggtagtttgtagctagttactctgtcagattacatgtaactgtagattgtttaaatagaaagagaaaaaataaaacagaacaaagaatgccttagcctcaactcctcaacacatgggagatggacatgcccctgcttagaccaagcaaagaaccgcctatctccccggcacaacaatcgcctgccatgctctagattatcagctgatcgtcgagtatgtttgccgatgagatgcgttgtgccgcctcctccacatctctgacgaccaggctgtttctttcatttcaaatttcccaaattactagtttaaacaaggatcttaatttgcgcatgatgatgttgccgaccttgaagattttgtttgtgtgctccaccaacgtcactgccattcatccatctgctgttgccgcacctcgcggtcacgatctgacgactgtccaaatttacagggctaacaatttcgggacgaaatataagaaacttcagggggtcccggtaggatgttctaccacctaaaacttttctttttatttaacggaagttggtttagatttagcaaaatttgtccaaattttgaaaaatattgttcaaaggttccttttttttttgttgaaaatctcataatttcagtgaaccctggtataattatgtattcgaaaatagtaaaccttgcaaatttgttgtgtcaaagtttctcatgcacagtataattggcagaaatatttatttggtcatcctcctacttgtaatcagtccgaagtccagaggcgatttgtgggatagcagttgtttcatacttctctttttttccccgtctaaatgtaagttctacagtatactcaaatacttgatacctttttttcaatatactcatgtctcatttagcaatcattttcaacgggtaacaattgcaagccagttatatataccattttagcaaatccttaatctgcacaattttaaattgacatacatctaactaaaacggggtaatgccttgttaaaaagagtcagccccggttggtaagcagtactttcatctgtactcttccaaaattaaaggctgagttattttttcccgaagaaaattgaacgcagagttttgactgttagctctgatgactaattgcagccggatcaaatcggcgagatcattgtgctgcagtcagatgaacatggtgactgccatgtggccccaccactcgtggacccacctgtcagtaaccatgtcaggggaaacttcacgtaggaggatctgcttccatatatgcgaggaggccaatcaggcaaggagatatatacatcacgccaaatggtgcatgctctgctagcaggtagctgctcgtgggattccaacacgtgtgtgtatatatatggaggagagactacggatcgaacgtccaatacaattgttttcattggacgcctcttctactgttggatacacattcatcctttttatgtccatctgattaaaaaactattacctatacatatagagaagagcaacagcaacaaaaagttgaccgcacatgcatagtatcaaatgagagaggtataatggtagtggcaagcttcaaaacattttttctcgaaaaccatttatctgatttacaatccgattgcaccattgtattcattggaattaaatctttataacaatatatcacatcattatattctgatgaaaaaaaatgcaaatgttttaaccgttgaacttggatgtttcacgtgtgagaaataaatgtttcaattagaatttgactatgttgcagtagatatttataaatattgcacatgatattatttatatgtttcaataagtattttctaatgtttcactagttcaatgtaaatattgcactggtgttgtttgagtgtttcaataaataggtgtagtgttgcaacacttataactcaatgtttcttatatggaataaaaatgtttcaattaggatttaacagtgttttattctacttatttttttttatcaaaatataattaactaaaattttgttgtaaagatttaattgcaacggatataatagtgtaatcggaatgtaaatttaataattatttttggagaaaaatagtttgaagtaactaatacatgcatagcttttttttttacatacatgcatatacttatatgttagagtgatgtactaaggaaaaaagtaagagagagagagaatgaacagccatgtagtaacctgagagaaaagataagacaacagctagacatgcatgtaagccgtgtgcatatcacgtccgatttttctttgctgcatcggacgtccgaccactagcatttttgatatacgagaccttatggtttaggccacctatttgaccacctcaccacgttcaggagtagcaggtgtcgggaagtctgatggtttaagcgttctagcgttctcacgagatcatgtgcttcgcaagctgtaggaccagacatttgctcaaaacggatgcaatcactacattgccctggtcaacacattgccggccaagcgatgaggaagggagtcgttacaaatctagaagatgccccacctagcttagctgagtgctgacgagagaacacatgcatttgctcattgcttcaacatgaaactcatgaaagtacacagagcaatataatgtagatgtagttgagcactgctactacgtagctccaattctcagccaaggatctcaaattcccaaccacaataatagtacatgcccctaagagtagttcctaaagttaccaagttttatatacgatagaaaatatggtatctctcgatactttctcaactatgataaaaatcactaaatgatcgagcttgactatctatggcaggtaaagcctaaagctttgcagagagcaaataatttggactgtgttctgatgtggtaatgtgtctacgaatcctgatacagttgaaatcacctacgagttactcccttcgtcctaaaatataaacacttttagcatagtgtcaatgaagttaaatatttgtagctttgactaataatagcaaaaaaaatagaaaagatcaaacatgtaaaattgatgttactagatttatcattaaacaaactatcacaatatgcaactctttttatttaaagcattttacttttatagatatcatcaaagtagcatctcgaagactgtatcgaagtctaaaagtgtttatattttggaatggagggagtagtagaaaattattttggatccaggttgtgcgcgcattggtacattcatggtatggctccacagcgtgtgctgtatctagtctagaactagaaggataccctctgcttttgcctggtgaaggcagaggttgtcgtaccctccattcacctttcatgttagtccaatagcatggagttgcatgcatgtctggacttctacaataatggccagtatatatctcgtcatggcctatgtttaaaaggtaatctttaccattcttgagaaagtattagaagaggtattacattttttatataaaatttggtatctcgagggtatcaaaatttttagtgtaaaatttaggtacctcgatgttttggttagagcaattgtatggtcctagatgaggtactaaaaatttaatgtaaaatttggtatctaggtagcaagaggtaccaaatttataataaaagagcaatcttacgattcttgaggaggtaccatgaggtaaaaaaaggggcatttgcaaatttgccacctgttttttcaatattgcaaggatgccattcgaatgacagttctagcggcatttttgcaattttctagtggcagttttacaataacgatttaaagtagtggtaaatttgcaattgtccaaaaaaattagtgtaaaatttgggagatttgcttcggtccaacaaaaagtatctcgaggtaccggtatctcacggtaccaaatcatttgctatcattggatctaacaatgctcatcctgcccagctagatccaacgatcgaaaactatttgataccttgaggtaccggtacctcaagatactttttgctggaccggagtaaatctcaaaatttgatatctcatagtacctaggtaccaaaagatactaaagattgtacaattgctctttggattatgttttataagatgtacagattttttccaaagtaaaataaatgcgaacaatagagagcgataaagttgcattaaggtatgagagaaatttgacttcatttagtttttcacttagaacccgataaggcaggaagtcgcataacaaaatggcacaatattaagtcaaaaaacaaaatagcacaataacggaatgaaacaactgaaagagatgggctagctttattatattgtatatacaatttttctagtttcataaaacatataaatatgaaccaagacagtttgtatatacataaatctctcttccaagtgcattcacatcgtcttgataaacccatgtaccaacttaccaagtggtagtgaggaggtatcactggtggagaaaccctttgtagtcccggttcgtaacccccctttagtcccggtttccaaactgggagtaccaatccgggactaaagatcgctatctttagtcccggatgaaataaccgggactaaagatagatctgacctttttttttgcatggccctgttgctgcatggtttatatatatatatataaaccatgcatatatatgtttcaatacatatatatgcatacatatatatatgtatatatatatatatattatattatattatatgtatatacatgcataatatatatgtatttatacatatatatgttatgcaaatgcatatgtatatagatatatatatgaccaaaatatatttacattatagaaaatgtgtacacatgcatatagaaacatatgtagtcatgtattaattacaatccattatatgtcctagctagctacgatttcgacgtagtagtactcgctgctagctcagaagctaaggaccggtgaattgtgtttccgtcgtagtagaattcacccttgggatcaaggatttcttcgttgatgaatcccatgagttgttcttgaaccgccgcgataaattccttgtgtgtggtcaggttatccctcatgcgaataaactatatgaatgtatgaaattgattagtaattaaacaagaaatcgctacgtaatgaaattttgaatttatttgtatgtacatcgagctctcttgtggtgatgatttggtctgcaaggcagtggcaatactcgcacacgtaatagccgcacaagttagttccctgcttttgctttgcgcactacaaataaatgacaaacaacgagagatctaattaatatacacttgtatgtatttgaatcggagaaatataaatgtagagcatgtgtactcacaggaaatttgaacttccgcctaagtctttctctccatttgccgcggaccaaatgacggaaccgataccaagccctacatggagtttaaagctatgattcgtagtagcaattaacataacaagattttcttaattaacaaaggaacttatgacggtacctgtctataagttcgaaaaccttgtcaaacgtagactcttttttatccattgagtcatatacgttgacggtgcaggcctccaggtcgaagagtaaaagcacccagtggaatctgcaatgtgcgtgggatgcattacatatgaaacacttagcaagttcgtacgggaatgaaatttggtatgtaggaagacagtaaaattaaactaactctgtgttgtatggcaacagtatgaacgtcttgtaatgctgcgccttcaggagatggacgagattgtcctctgtttcttgtggatattggtcgagcattgcgacgtttactttccgagggtcgatgaatccagtatcgaaaaccctccgccgtcgggccctttgaatctccattctacaacgataaaagggagtatattattttctatagtctacttatatacaaggacctaattaattaaaggagacgtatagtaagaaatctaactgaacgatatacttacaaaatccagcaactcataatagagacgtcgagggcgtccagctggtatagttcgtagattcccctgaaattgatccagagaatgtcatctccttgcaagaagtccgtgtccctgatcctcgctccgatcatctctctaccggtggcgctcatctccatgtacagctgatggaacttgtacatttgtgtgggtagggactgcagcagctcaggcttgacaagcggtttaccgagttcgtacatgtattttacttccgccttttcgattggtgcgactcctagcaattgatccgtagttagaccggtgtcagtaataaattgttctatcgtcatttctttaccggtcaccaacggctcgatctcctggtttggttgctctccaagctgagggactggtttggactttccagaagatgctttcttcagcgttcgctcatagtccgatagcttgatggcctccttgacagatgcagacatatccctgaagaagttcctgacactggggtctataggaatcttcttttctggacttcgaggcttgaattgtctcttgacttctgatgcaacgtaagcgtcaagctcctcttgcgtgcaatcgtaccccgggtccttgttcttggcggcgtcaactttcgccttcttcgttgcccttgtgtgggtaggcggtggagctgggggggcccttgactttgaaggtgtcggaagaggagcttgcgggggagtaggtgtaggagcacgaggaggagtcggtgcaggatcctgaggaggagtcgatgctggagcctgaggtggagacggtgctggcggagcatgaggaggagacggtgcaggatcctaaggaggagatggcggagccggaggagatggtgcatgagacgccgcttgtcgcccagggaggatgatgtaccgcctgcgccatagaataatggcatggcatgtgtctcgtagatgcgtctcaccgtctcctccagggtaatccagctcaagttcctcgtacgcgccttcgaccaactcaacttcgaccttcgagtatcctgctggaatcggcctgcagtggtaagtacctgaagggtccgttggaatggccatgcccgacgccaccttcatgttgtgagagattatttattagtaatcaacatatataagcagcaactagcggaatggctaaatcttacctttattgataagttcttgaaaggaatatgcagctcacatggtgtccgctgagtgatgtcatcaacgggacaggtcgattcgtcctgtgtttgcatggcgtccatgctctgtgatcctacctgccccgttgaggcgcagctgctacggtttcctgacgggctcaccattgcaggaggaatggttggctggggatcatgggaccgatgtgcggccatgcgttcatcaaccttccttgccacctcctcttgcatgttgagttcgtagctcgatacccggaactctaggtctgcaatcttcgcctcggtatctctcttgctcctcatccgactcctgtacgtgtggatgtcctccttgaaaccaatcttccaaggaatcacccctttccctcgtgttcgtcctggatgctctggagtctgcagggcgagtgtcagctcgtccctatctctgtctggtcggaacgtgccctgagaggaggcttccactgcatctgttagtcgtcgcgcagcctctcgtatctgatcgccgaagaccagtgagccatcagctgggttgagcgttccaccgtgagcatagtaccagaacttcgatcgttccggccaattggctgttgccggttcgatacccctctcaatcaagctagcctccatctgctcccacttcggcatcgcgacgctatagcctcctgaccccaagtggtgatggtacttcttcttggcggcattttctttgtttctttccatcatcgcctgcccttgttcacctgtcttatatgcaacgaactcgtcccagtgatcccttagctttgggaatgtgtcgaagttcggtgtctgccccttcagtatatacttctggtacagatctcccttgaagctctgaaactgttctgccattttcttcagagtccaccttttcactttgtcctctgtacccgcaggaagggtgaatgtctcgagcattgtggtccacagcatctctttctccgaatctgggacaaagctctcatgatctccgcgtgcccttgttcttcgccagtacaccgcactgacaggcacgttatcccgcacaacccaaccgctgtgacgtacatagttcttggcggcttcggccggggcactaggacgtccatcttcttccacttccgttatgatgtgccgaccctcaagcttcttcgctgcacctcgttgcccgcgtgccctcttctgtccaacggagggttgactaccactagcctcctcctcctggttcccctccacatccctttccacgtgcccctgctggttcccctccgcatccctctccacgttcccttcctcgttcaagtactggtttggatccttgttcccctcttcttcattccagtactggctgcttccctccgcgattgtatcgtacaatatctgttcctcatcgcggtcagccatctgttgatacaagaaacatctgctaagtcacgagacatttatgttttaacaatctaagtcatgtatgctaagtgtaaatgtcgtacattagaaccctacacaaccttacgtgctaagtctaattacaaatcgtgatataagctaagtctaggtgacgtatattatacaaccctagctagtaaataattatatactaagtctaattacaaataaaataatcttatattaaaactcaaataatattacatgctaagactaaaatagtcatgtatatgctaagtgtttcgtgcgtatatgctaagtctaattaagactacaatagtcaattgctacttgtcgcaccaattccgtagtcaataattacatactaagtctaattacaaataaagtaatcttatattaaaactcaaataatattacatgctaagtctaaaatagtcatgtatgctaagtgtttcgtgcgtatatgctaagtctaattaagactacaatagtcaattgctaggagtcgcaccaattccgtagtcaataatgtcatactaagtctaatttgcaataaaataatcttatattaaaactcaaataatataagaacactacacaatcttatatgataagtctaattacaggtcgaataatcttaattaattgcattacaaatataacaatcatttatattattacgtcacttgcctgctccaattccttctagggctagctcttccactcaggcttgacggacgactccgacaacacgtcttttctgcaagatacaaaaagatgtattaggataaatgcgaagtaacatatatatatatatatatatatatatatatatatatatatatatattgcatttcacgttaacgttcgtcctcgttcgtttgctcgttcacgttcgttcgctcgttctcattcacgttcgttcgcttgttctcattcacgttcgttccctcgttctcgcttgtcttcgttcgatcgttctcgttctcgctcttgttcgttcgatagttctcgttctcgttcacgttctcgcggcaacgtacgttgacgtgttcgttctcgctctcgttcgttcgatcgttctcgttctcgttcgttaacggcggtgtggcggcatcggggcggcggttggcgcggcggcgtggcggcggcggcggcggcgtggcgacggcggcggcggcgtggcgttgcggggccgtggcggcggcggcgtggcgtggcggcggcggcattgcgcgcgcggcggcgaaggcggcggcggcgtggcgacggcggcggcggcgtggcgttggcatgcggcggcggcgttgcgcggcggcgaaggcggcggcgtggtgcgtcgtcgtcgtggcgcgtcgtcgtcgtggcgcggcgtctcgtggcgggtggcgcgacggagagagatcgagatcggagagatcgagatgcatgaagggagatctggcggcggcggctctcaccccagagatgcggcggcagcggaggaggcggaggcggcggcgaggatgacgagctcgagacgacggcgagatacggcggcgtcggcgcggggatttgccctaggcagtggcggcgaaggagagaggccgagagagatcgatcggccgaaaacgtctaagtgttggtgaagaagacgagggcgcaccgggaatatatatacccccggatctttactcccggttgttgagaacaaccgggactaaagatctttagtcccggttgttctcaacaaccgggagtaaagatcttttcccgctatttcgaaattctttttaaacccggttagggttaagaaccgggactaaagattatagcactgcatatgattttcgcttacatatgtgtttataaaatagaagttaatgcattaacattatttaaagtacaaagattaatgacaattacttcgaaaaattatttttgtctgtaataaattaagtggataaatcgtaataagcaaatataattaataaaaattccaataatcatatatacttagcatatatatgaatgatattattatattggtaaaaactctaattaagatatgtatgtacatactgcatgatttaaaattaataaaaattgtaatcatcatatgtacttagcgtaggaattatattaaattaaatgctaaaaactctaattaacatatgtaaatgccacatgcatgatttaaaccttttaaaaattcgaatagtcatatataagtagcatatgaaagatagtaaattaaattgtgaaaaactctaatatatgaatgatagttttaaaaatatattaaatttaatacttttaaaaattctccagtcaattataattagcatatgaatgatagtaaattaaatgttaaaaactctaattaacatatgaaattgccacttgcgtgatttaaaacttttaaaaatcctctagtcaattataattagcatatgaatgctagtaaattaaatgttaaaaactctaattaacatacatatgaaattgccacctgtgtgatttaaaacttttaaaaattgtaagtatcacatataactagcatatacatgatttaaacttgttgaaacctctaataatcgtgcgtaattaacatatgccatacatcaattgatttatatggataatcaatacatccaaaatagtttacatcgtgtacacaataattacggcacgtactttctccccactattgttccctccttgtgatcgctgcgtgagtaaggggtgtcttcatttgataggaggatgctagggtcaatcgtcaccgtgaaagggggttgcccatccaactgatcgtaatcctcgtcagtcttgtcctcaactccgacgatttttcttttgcctgggagaaccacttgacgcttaggctcatcaggccctctgcccttctttcctttgctagacatgtccttcacgaaaaagacttgcgttacatcattggcaaggacaaaaggttcgtccgagtatccaaccttgttaaggtcaacagttgtcattccactgtcatcaatcattacgcctccaccagtcaacctaacccattggcaccggaacagaggaaccttgagaggaccatagtcaagttcccatatgtcctcgatggcaccgtaatacgtggcagttgttccatcatgtcccatggcatcgacacgaacagcgctgttttggttcgtgctcttcatgtcttgggctctcgtgtagaatgtgtacccattgatctcatatccctggaatgtcgcgatcgacccagacggtcccctcgccaggaaggcaagttgttggttgatcgactcgttacccatgagatgttgtcgtagccacgcgggaaaagtatcaatgtgatgccgtgtaatccatgcatcggacttaccgatgttcctggcgcgaactagagccaagtgctcctcgatgtaaggagctaccaatgaagagtgttgcagaacagtgaaatgggctttacggaataaattgttgtctaccgtcgttattgctttccttccgagagttccctttccccgtagtctcccttcatggcgtgattcaggtaccccgattgggcgaaggtcttcgataaattctacgcaaaattcgatgacctcctctgttccataacccttggcgatgcttgcctctcgacgagcacggttacgaacatacttcttcagaacgcccatgtacctctcgaaaggaaacatgttgtgtaggtacataggcccgagaatacggatctctttcacaaggtgacaaagcagatgcgtcattatattgaaaaatgaaggtggaaatatcaactcaaaactgacgagacattgcaccacttcattctgaagggcttctaatctatccggatcgatgaccttctgcgaaattgcgttcatgaatgcacatagctttgttattgttgcccggacattgtctggaaggataccccttattacaactggtagcagttgtgtcatcaacacgtgacagtcatgagactttaggtttgtgaacttcttctccttcgtacttattattcgcttaatattcgtggagtatccagatggtacctttatgctctccaagcattcaaacatactttccttctctgccttgctaagagtgtagctggctggactcaagtaatggcttcctttctcctttggtttcgggtgaagatcgccgcgttgttccatatgcttcagatcattacgtgcttccagtgtatctttcgactttccgtatacacctaggaagccaagaaggtttacgcaaaggttcttagtgaggtgcatcacgtcgattgcgtggcgtacgtccaagaattcccaatatggtaactcccaaaatatagagttctttttccacatcgccgcgtgaccatcttcgctctctatatgctggcttccaggcccctttccgaacactactttaagatctttaaccatagcaaacactgttttcccgctgcgatgtttaggcttcgtacggtggtcggccttatgttcgaagtgcttgcctttcttccgtaccgggtgttttgctgcaaggaatcgacgatgacccatgtatacaaccttcctacagtgcttaagatacgtactttctgtttcatccatacagtgagtgcaagccttgtaccccttgttggactgtccggataggttgctaagtgcaggccaatcgttgatggttacgaacagcagcgctcgtaggttaaactcctcctgtttgtcctcgtcccacacggggacaccttccttcttccacaactatttaagatcttcgaccagtggtcttaggtacacgtcgatgtcgttaccaggttgcttggggtcttgaataataatcggcatcattatgtacttcctcttcatgcatagccaggggggaggttgtagatacacatcgtaacgggccaagtgctatggccgctgctcatctctccaaaaggattcatgccatccgtactcaaaccaaaccgtatgtttcgtgcgtcctttccaaattctttaaattttctgtcgatgtttcgccactgcgaaccatcggtggggtgtctcagcatcccgtcctgttgacgctcttcagcgtgccatcgcaacattctagcattccccttgttcctgaacaaacgccttagccgtggtattatagggaaataccacatcaccttagcaggaattctcttctttgttagctgcccgtcaaattctcctggatcgtcccgtctaatcttgtatcgtagtgctttgcaaacagggcatgcttctaggttctcatactcctcaccgcgatataggatacagtcgttcggacatgcgtgaatcttatgaacttccagtcctaacgggcagactatcttcttagcctcgtacgttgtctcgggcaatttgtttccccccggaagaatgttcttgacgagtttcaataaatcgccaaatgccttgtcactaaccccattttttgccttccattgcaacaactccagagtggtatccaactttttgtgcccctgctcgcaacctgggtacaacgaagttctgtggtcctccaacatcttgtccaatttatgggcctccttttcactttcgcagtcctccctggcgtcctgcaacatctgaccaagatcatccgcaacgtcgttaccatcagcagctatttcctcctcgcccgtttgatttccttcaaatccaacatactgagcaaagtccggaatattgtcgtcttccacttcatcttcttctatttcaacaccttgctctccgtgggatgtccaacaattatagcttggcatgaaccccgactcaaacaagtggaaatgaatagtcctggatgcagcatactccttctgattcttacacttattgcatggacaacaaataaaacccctttgcctgttagcttcggccactctcaaaaaatagtgcacgccgtcaataaactctttggaccgccggtcagcgtacatccattgccgatccatctacatgagtcaaaaaaaaccgtacacaaataattattcttacaataatgacagtcatacaataattataagatatctttattcatacaaaaatcataaaatattacaccaaataattcttaaaaactatttgtaaagttttaaactaattttaatgtgttttacttcttttaatttttattttagtttgttttctattatttaagattaactttcactagagttttccttctcaactattttataaaaccttgtttagcaaatgaactaaatctctatatattctttcttccccacacacattttctctctcatcaacttacaactaaattttggagacaaaaaaagtgtgcaaaacataggtgcaaatgtagtatgacaaaaaaaacattggaggatgaagttgcaaaccttttaggcacctccgatttgtatgtaatcaccaaaataaatttaatagaaattttggcatgacctcccctcttttttgaagaaattttgaagcttgctcgggcagctggaggaggaagaagacatatatataggggtgggactttagtcccggttggtagcaccaaccggggctaaagatcaccgggatctttagtcccggttggtaacaccaaccgggactaaagttacgtcccggttggtgttaccaaccgggactaaagatcccgggggggcctgacaggccctgacagcattcgaaccgggactaaagatgatctttagtctcggttggtaacacaaaccgggactaaagatcaaatatgcccgttacccttttgaaccgggactaaagatcatctttagccccggtttttattgcatccgggactattgtggaaatcggccgaccgacgaaagatggtttctccaccagtgtattttatgcgtgtgcacaagggagatgagctgagcaactcaagtactcaacagagtattactgaattaccaagaactacactccaaaactgcatgcaaggagaagtccagctcgatctatgctcagttatttcataggtttgggcggcatcgggaagtcggatgcctcgcctgaagatcttcacgtatggagtacgtgcagaacatcctgccagtgtggcacataacccgagaggtccggatcgaacgtaggaatagtcaagaaaatggcaaacaaacgtaccgcgtattgtctcttacagccttatagcacattctgcactcttgtctcatgggctgtgcacattgttttgatacccatggagatcattgtgacctcgttggcctgcgcaagccatttcactatcttcttctcccagggtgctatgtgaattaatttcttgaactcttagactttgctttgatcctggcctttcttgaaatggacttaattaataatgtccctgctataccgatggaaataatatcattttagctaatggagaaagatttcagtagcaaaacaaagtaggacgtacacctttgaaactcaaaacgcgtttagttggtggatcatgggttttaataagtgtaatgtctaaaatcactctgaactattgtgctctcgtccaatttgcacccctcaatcggatctacaatagttttagagtccgggccactctcaaattgaacgtttgctatgaaaatataatttccaatccctaaataacatttaaattccatttcacaacaaccataagcttagacggccgtctggggtcattggtggtgaattcgcccctaccaaccaccgtatcgaatttactataaattacatagaattgctttctacatgaaaatgttaaagacaaattaaattgatccaactgtgtggattaaatggcatttttttctcttttaagaaacaaccaatatatatatatatatatatatatatatatatatatatatatatatatatatatatatatatatatatatatatatatatatacttcccaaaaacaaacaaccatctcatagagccaggtttataaacatcgcacaagcgtgaggagagagtcagataggtaacaaacctttagaggcatggttagttagctaaaaaaaatagctagcatgtgcgttttttgtcacacgtatgccatccaactggatttttcacattttggtccttttaaaaaacttatttcgcaaatagacccctgaaaaaatttatctcaaaaatggtccttttttggcgccagagtggctggcgccgtcatccaacgggacggcgccatctctggcgccgtcctcctgccaccgtggcgcatgcgaaccgacgtggcaggaggagggcgccagccatgctggcgccgccgcctccattcctgtttctctgtatggagttgcaacggtgtcttttttattttattttttcggatgttttttcacacttaggatcacgatacaaccaaccacaaaaaaaatttaaactcgaactaccacttagctaagtctgaaaatagctagcataccacttagtctactttgcaccttcactaaaattagaccataattcctttagtaaaaccctttgatcagcatgttaaacataatacactctaccactatatgaaattacttaatctaattcaaaatataaccacatgaaatgacatatataagttaaacagtacatagagatgtaattttttttatttttatttcatttttttgatatgtttttcacacttaggagaacataggaaccaatcgtataaaaaataaactcaaacggacaaaatatgtgacttgtagaattttccaaaactctaccgaaacggacaaaatatgtcatctattaaaataggcgtaactttctcatacgaactcggaatcaggcaaataatatatgtacggacatctatagaaaatgttacatccaattctccctcgctttgccgggttcggcgatattaaaacctccaaattccgcttgcaagattgtgttttcgaggagagaagtttttcggtagaactttggaaaattccacatgccacatatttcgtccgtttgagtttattttttacatggttgattcctgtgagtttctaagtgtgaaaaaaatatcagaaaataaaataaaaataaaaaagttgcacatctctcctttgcactagttcggagagagaggagaggagaggaaaaattttacaggtcacatattacgtccatttgagtttaatttttctatggttggttcttgtgtgtccctaagcgtgaaaaaaatatcaaacaaataaaacaaaaataaaaaatttccgggggggggggcgccagccactctggcgcactccctagccacctcagcatcgccctgccacgtcagcagggggacggcgccagagaggctgacgccgtcctgttggacgacggcgccagccactctggcgccccaaaaaggaccatttttgggataagtttttctaggggtctatttgtgaaataagttttttgaaaggaccaaaatgtgaaaaatccagtgccatccaaattggcaaggacgatagaaactactccaattcggagcagctacagtaccagcacttcttgcacgggctactcctctgcattattggacatcttcaccagccaaaggacatgcatgcatcagatttggagtgattagtggggaaacagcttcggaattaatatacggctgcaatccaaactaggatatcgagtatatttggtgcgattatgtaattcatttctaacaaatcactgagatatagtggcatataagacaatcatatttacgaagacaaaataaggatgaacagctcaacactgtccagactctgatggtagatggtatgaagaactcaaatattaatcgacatatcttaggccctcttttgtttagccttataagctagtttataagtcatcaaacctaaactaaacaaacaatcagttttttcgtttgacctttgtaaagccataagtcactcttacactgttaagccaaaaaactagattagaaaagttgcgagagatttgattacaccccattaaacaaaaacttcaaatccacctacttatataaaagagagaatctattctataccattgagtttatcctagtttataccgatgactttatctattgttctacaatatgccattaggatgggcatctttttttaaaaaaaataccaaaattacccttagagacatacatggttaacaattaatttatcttgttagaagttaaaaaaaatatgaatttttttatatggcatccttacacaacagagaagtatgtacataagttcaatttttttttggtatttcttttagaaaaaatatttttgtgtggtatatcagagagaaatagcttacacaaaatataatagcaaaaaatatcttatgtttcatttgaaagataatttacattaaaaacaacaacacaaaaaatattttatatggcatataacaaataagttatatttaaaaaatagaaatgaaaaaaattcaaacttttatattgtgtaaggaggctacataaaagttttcttctttttttaaacttctaatgatataaatcaactgttaaccttatatctccataagggtattttaggttttattgaaaaataagccaaacccaatgacgtaatctagaaaaagaaaaaaatcagtggtaaattgttgagctatgataaactcagtgatatagaatagattctctctcaaatatataagaaataaactcagttaaaagtctaccccaataaacataaccttaataaagaggaccataggcttatatatggcgctccaaggtggaaactggatctcgatcagatcatcttgcatttacactaatgatttattttgccattcaccacgctttctacttcctagcatatatccaagcatgttaacacggtgctataattcgattgggtcataggtgattctttcatgtaggattaaccttagactattcacttatagaacagtctatgatcttttcctcacaaaattacctttcatcatagtgtatatccattgatgaaaataacttgcacaaattctcgaagcctaccaagccacaaactatattaattgttggttaactaacgatgaacacattgccagccaagcgatgaagaagggactcgttacaaatctaggagacgccccatgtagcttagctgagtgcttacgcacgaacacatgcatttgctcattgctgcaacatgaagtatgcagaacaatataacgtagatgtagttgagcaccggtacgtaactccaattaattctcagctaagaatctcaagttcccaaccacaataatagaacatgcccctaatattagtacctaaacttatctaggtctacgatagaaaatatgttaaccgagagagatatatctctacttttataaaaattaaatatgtttttgccgatactttaagtcatccgtgtttgagtcggtttcaatttattgtttcggttttaatctctactcctcaaaatccataacttaaaaagggcacacggaaaaagaaaacacgccataaaaatcgcaaaagaaaaacagaggaaaaaaaagaagtacgattggtaccggataaaaaaatttgcaaaaaatgctgggtaaaagaaaaaaggccgaccgtaaaaaaaatcaccgacggttaaaaaaaaggtcatgtggaaaaacggattggtatcagtccgtctctttatccggctttttttcccctttttttcgtcttcttttttgtcgtccgttttttttccatccgtattttttccacccgtatttttttccaccgttctttccggttattttgtcatcgcctttttcccttttattcatccgtctttttgtccctatttttttttttgcatgcggaagggtgtccctattttttattcgtatttttttggcatgtggaagggtgtgcgcatatggtgaggattcttttttatctaggttttttccatcgtcgggccaaaccttagcaccaccgtcacattgatcaacctcctcatgctttccctcctccaattgattgtaaaaaacaatctccactactccgtcatcattttcccaatatttttttcttttcagttccgctttaattcaccagattccatctttatttagaagtcattgtttatatcccacaattttgtggatttgctccaattttgataaaaacaaaaggaggagattgagtgaatcaaaatccctcaaccaatttttagagatcgagaaagatttgactgaatttgatgggaggatcggttctggcattgtactacacgggactatctttcggaggttgaagatgacagtcgactatgcgagctaggttatagttctacttgtgggctaggtcaaagagaaacagatggcaggcgactatgcgagctaggcctatagttttacttatgggctaggtcaaagagaaacagtctaagcaagagggaggtagcgggctaggccgagactgaaaaggaaggaagaaaatgagtttttaacccaaaatcaaatagtataatgtatagcaatccaaaaatgtttttacccgttgcaacgcacgggcattttttcatgtatgtgtgtgtctatatatatatatacatacatatatatatatagaaaaactattctacacccgaggtatataatagttattctatacccccctccctccaacccacctctcttgccaccaagggggcaaaacccaccctccacctcggtcaaacccgcccatcacttttcccaccacctccactcttctcagctctcgtctcagaacgacatagtaacgtgatatttatcgtggtcttacttgcagtaacaatgttgaaatgtagtcataatatagtcatgacggatctacttttgataagcattttttttctaacatcatggtgcaaacggtttttaaaagtagtacatgatgtgagagatattacccttcaaagattggttttttaaaaatttggctctccacgagcagtaatactatatcataagtattactgctgatctgctatgcgttactgcaatcacatcacatcgttactacatgatgtagtaatgattataagtttcatagtaacatagtgtgttactacgattacttgataacgttactgcaagaatatgtatagtaagaaaaaaatgtgtagtaacatggaaagagagatgaattggctcggttaactcatggggcaagggtagagagaaccttacaagattggtcttttgaaatttaactctccacaagtagtaatactatatcataagtgttattactatctactgtatattactacaatcgcatcatgacgttattatgaaagtgtggtaaatattatatgttttgcagtaacaaagcgtcttactgcaattcttgaatagtgttactgtataaacttgtggtaatgtgtatctgcaatgcagtaacacttacacttttgtgcagtaacaaatatatggttaagcatgtagacttttaactcatatatttttgtttcgattcctagtttactacaattttaccacgatgttactatcaaaagtgcagtaacatcctatatgttttgtagtaacgcgacgtgttactatacttatacgataatgttactactaaaacatagtaacttgttatgagttttgtaataacatatgtatttctcttctacttagcttcctacaactatataactttgagtgtcctgtagagttataacagtttatgtgtttttacagtaatcgtgtgtgttactaccatttcttctcgaagattggtcttttgaaatttatctctccataagtagtaatactaaatcattattgttattattttttattgtgagttactaccattccatcatgacgttactgtatgtgtgcaataaaaattataatttttacagtaacagtgcatgttactacaatttattaatagtgttactgcaataacatgtggtaacaaccaaatacaggtataggacctaccacctactttgaactaggaaatgtaagtgcaagtgatatcttttgaattctcatctttaaacaaagatatctctcacaccacatattatatttttgaactgtttgcaccgtaatgcttaaaaaaagagctctacaaaactagatccatcatgactatattttaactatattttattagtgttattgcaagtaagctacatcgttacggcatggtgttcgtcctgttattgcaccgttcgtacgagacgaggacaacaaataggtggacgtgggaggaagttagcacacgggtttgactgatgtggcagcgatttgaccgtcctttgaccatgctttgactggggtgggaggtgggttttgagcccaataaaaggagggagagatagggtgggctcttgaggggagggggtatagaatagttattctataggggggtgtagaatagtctcaccctatatatatatatatatatatagagagagagacacacacacaccttatgttttaggccactctctgaccacctcaccaccttcaggagtagcaggtgtcgggaagtctaaggcctctcacagtgcactgagctggcgcggaactttcttgcgccagctcagattttggtcgacgtagagtgcaggaccgtgtctcaggtaggtttctcgtccccaaacaaagcgacgcagaacctcaccagtttgagggcgcaagtggacagggagaagcgagtcgggtgcgctgtgggcggcgttgcttcgccctcacatgccctcgcgccgaatcccaccgagaaatcctcattgtgcccacgaaaattcccctcccgccacagccattcttcctcccgccaccgagtcaagaaaatgcaagaaaatcttggggattagaagaggagaatcgtttgtaggtaaaacaaaaagaaattaaagaaataaaaatcaatagaaaccaacagatcgaaaccaatgtccaccacaagatgaaaaagaaaaaaaggagacaaaaagaagtcgatgtcggtggtggtggccgacgccgccgtggcagccggggacgcctcccgccaccaataactggcctccgcccagcggatctagtcccccacctccttctcctcctcctcgccgccgccgcgtgcaccggaaaagctcgctgggttgaggagggagaccggatggaggaagattagcaccaagctcgctgctggaccaactcttgtgaagctgagcctcgccgtcgctcgatggggggaggggaaagaacgctcgaaggcggcgcagaggagcgatgcgacgtggctaagctaaggagcgattcggcgggcgaaaaaggcacggttgtgcggatagagatggcgagtcgcgagagacagcgagaagcctcgagaagtaaaaaaaaaaagagaaagaaaaggagatgcgggggtagttgaggaaaggttatggtaatttatttctttctgctgtttggtccactcaatcaaggatacaccactgtcggctaaatttttttcaggcgtgcctttagatatgtttaggctctatttgaggtcacatgcagtttggaggttgtttctttcaatggtgctaggcctagctggcgtactgggtaactcaatatcggtgcctgcactgctatcgctataatggtttaagcgttctcacgagatgatgcgttgtgcaagctgtaggaccagacatttgctcaaagcgtatgcaagccatacattgccctggtcaacacgctgccgggcaagcgacggagaagggagtcgttacagatctaggagacgccccatgtagcttggttgagggcggacgcatgagcacatgcgcttgctctttgctgcaacatgaatgttcgttgctacctctttccaacccctctccctcgtatttcgtgtgtatgtttttcaaactgctaaacgttacgtcttttgcaaaacgtatctatatgaaagttgcttaaaaattcatattgattcatttttttaaaaaatagctaatacttacttaatcacacgctaataaaccgctccgttttccgtgcacgggagatttgttcccaaccacttaaaccgaacacagccatatgcagaacaatataatgcagatgtagttgagcactgctacacgtagctccaattctcaaccaaggatctcaagttcccaaccacaataatagaacatgccactaaggctagttcctaaagttatcaagttttaccatagaaaatataatctctctgatactttttcaaatatgataaaatcactcaatagtcaagcttgaccatctgtggcagctaaagcctgaagctttgcagggagcaaataatttggactgtgttctgatgtggtaatgtgcctatgaatcctaatacagttgaaaccagctacgagttagtagaaaattattttggatccagctggttgcgtatgcatttggtacattcatgtatggcaccacagggtgtgcccttctagaactagaagggtaccctctgcttttgcctggtgaaggcagaggttgtcgtaccctccatccactattcatgttagttcaatagcatgtttggacttctataataatgaccaatataccccctccgtttcaaaatgtttgacaccgttgactttttagtacgtgtttgaccattcgtcttttttaaaaagtttaagtaagtatttattcttttcatatcatttgatttattgttaaatatactttcatgtacacatatagttttacatatttcacaaatatttttgaataagacgaatggtcaaacatatactaaaaagtcaacggtgtcaaatattttgaaatggagggagtatatctctgtcatgacctatgttcaaatggtaatttttagcattcttgagaatgtatcagaaggtattagattttctagtataaaatttggtatcttgataggtaccaaaatttttagtgtaaaatttagttacctcgagattgtttttaaataccgtaaaaattctcatgttaaaataataaattgaagtgaaagtgtttatctgacagtttctcaacatagttttggatttgtttacttctgcttttcggaaataatgttttggattatgtttcataagatgtacacattttttcaaagtaaaataaatgtgtacgacagagagcgatacagttgcactgaggtaggagagaaatttgtgacttcatttagtttttcagtgaaccagataatgctggaagtcgcataacaaaatggcacaataacttaatgaaacggctcaaaatactaataaccataagagagtgcgaagaaggaaggtgagatcttagacgcataagaggagctatatatgtaagttacattactgtgcaaagccccgcgagatatagctggctagcatagcatgttttccaagggtaactaacgcaaggaaatcacggtgtgtttagtccattgtcgaatcaaatgaatgaatcagtaatgacatccattactgattctgtgtgggtttgggagacgctaggagttcatgtcccacagcaccactttcgcagtggatgacaattcactccttaattctgtaacgtttatccttgtgccgctgaaccgctccataatgacctaggtggtttatcagacgtgaggtctgaggaattcgatcgatcagatgcatattgctgctgggtcaattgatcaactccggcgatccgctgatcattcaagtgtaatattttataagctagtttttactcaattagcgtccaatggaatatgttacgtttcatgcttgtgaaatcactctcagaagtcagaagcttagctagcccaagggctcccttgtcatgaaaacctttatcttccattatatagcgcagttttcgttctttggttggtggcgattttgtctcagtgggattgagagtaatctggaaataacaggggacggtagtgaacgctgacacgatcaggagtatccatttgtacgtgcaaagcatgctaattcatcacgatatcgtacgtagacaccaacaagagcaaaagcacaatatggttgactcttccatgaagcaaaaagatcctaaggctggctcaaaaggctgcaggatatggcaaattatttgtggtcttctaatcatttcgatttttgaggcatttctaagagcaagtttaataatataatccactattggctctaattcatctatagtcaatttatacaatagttgtttactatactattaatatatggtcccacctgtcatacacacactgcgtcttagagtccgtgctgcagctggctataaatctgtagcccgctgctcttctctctcatcttttatctcattaaaatatgtttatagctagctaatagtctactattgtacctgctctaatcaacaccttcgaaacatctatccaccatcaaacatttcagtgaaaatcttttggttcccctctccgtgtcttgttactgcttagatacctatacctgaaaattgatcatttttctaatggttccattccgaccctcagtactggttaatcttaaccagctgcagtgaagtgccctttataaagtagagcaaatttatcaacagccgccacgcgcacatacatgtctgtgtatttaattagctcttcgattgattaattagtgaacactgatacaatcatacaacccaacttcaacttggctttaaaaggccagtggcagaacatggatcaagatagcacaaacaaaggtttcctgtgagagctagcactagcagaaagggagagcagagagtagccatatatcacaaccgagaacctacaactgtaaccacacatcactcgcagactaccgtgttcatttccagatcatgggcacggaaggcaccaggaatgaacacccctcctcttgcgacctattcacgcaaatattgttgtttcttccggttcatcagctgcagccaggattcattaaaccgtttggggtgaggttactgccaccccatggtttgacggtactgcagtagccgcgcagcatcggtgaaaattatatggttaccgcgaggtataccgtggtttgaaaaactgagatggtaccagaacatgataacccgtgataaccatacgattttgtaaaccctggctacaacagggtagctcgatggacaaacataccgatggagggagcagcagctagcagaacacaagataggcattacactggagggctggattacgcatttgtctagtttagtattgggtgcaagtccacttgaagataggatgtcaatcggctcactccgtctcacaaagaataaggatcaataatttctttttaaaaatttattaactgtaaaaataatataatataacttgaatgtaactaaaatatattgtcaactttcaaaagcaccaccgctactcgctcgaagtggaggtcgtgggttctgtctcatccatattgaagtaaagttctcattgaatcattgtgttatgctgcagtgacaagagaaaagatggatgcaagacggtttcaatcacttggttgtcactgaatcaatgcatatgtcatcgaatgagggcatgtgccctgcttctgccacgtacgcatgatccgctgttccttgcgctaatctaacgattgaaaaaatcgacaaatttcaaggacagaaaattggcgatagatttattgcagaaccgatcaaagggagtatcattgtggttgcagataatacacaggtgcactctctacacgctgttgcttcgtcgtatcatataagtagatactccctccgtattttaatatatgacgctattgatttttttatccaacgtttgaccatttatctcattcaaaaaatttatgtaattactatttattttattttgacttaatttatcataaaatattttttaagtatgacataaatatttttttatatatttacacaataattttgaataagataaatggtcaaacgttgattgaaaagtcaacgacgttatacattaaaataaatacggagggagtacatacagtccgtaacatttaactgacaagagtgtgctaagtgggaaacttcagatgagaagtgacaagagtgttcaggcgagatgtatgatgtctatagattcatataagctggcatattaccaatttaccatacaggcatacatggctagtgcagtccgctgccaccgttcttgagggattttgagtagggattgagagtaacctggaaagagttaatgatcgtgctgcaggtttacactatcagcatatccctttctacacgccagttctgctattactgtaccagcgtatcggcgacttcggcgttactcatccacacgacaaacatacttgggcaccgagcgtccctggagattccaactcgtttgttctgttaaaaagaggtttgggtaattaattaaatggtgctataggatcgagccgcatgcgtaaccatcttaatataactataaacttcagtttatcttaatactatattgaattaattaaaatgatgtcttcttccgtataccaataccaatagtaaatagtgtacatgggttgtcatggagtatgagacttagctatatttgtctataagcaatatgttggagtgtctttatgatagaaattaaatacccttttctaaaagggaaagacataacacatgaaagaaaagtgaaaatcacccacatgtgcattagttctttttctttacacaggaaaatatccttgagccaagagttgtggagttttattctacatatagctggaagtttaaaaggatttaagcttagttccgtttctttctttataagtgagcttttttttatattgaactctcgatgtctggggtgagtctacgtactcgtgtttgtaccttttggctcggtacatcccattggatgtagaagccgagttgttataatctattattaaaaaagaaacaaaaatatatgctagaaaattacctttttactacttcatctatgcatacatgcatgcatctgcgcatttgttatgtgcacttttgtgctatctaaaactccaacaatttttttgacatccaagtccttgcaatttaatgaaatcttagtaaattgtaaggggatgcaaagcatgtatagcaaatttgcacatcaaagtctcatggcaaatttaatttaataaggccgtctataagttttaaagggattgaaagcatcccaaaaattgaagatatagtaaaatctattacttatgtaaacacatgtatagcaaaaatggtacatgccaaaactatttttttcctttgatacaaacggagaatggtcaaactatgataacctattatcagagacagctccaaattggcattagtagtagaaaattgttaagggctccattggattggagtttctttttaagaaaaaatagaggatttcaattcctataggatttagtaatattcacttatttggtatgaatgaatggggtattggaaaaatggaggaaagtttcctttcccattgattccatggtaaatgcatactaatctaaacatccaatagaacatttttttcttttgctttgagaagtccaaggcatatcaatgtatggacctcaagaaaaaatatagtttacatccatcttaggcacaggaatatatataggctatttcctatatatatatatatatatatatatatatatatatgatgcatatttagcaagaataatcctttgttttactccaattcttgtgttccaaacatctcatatttttcctctgctttttagttctctgtttcatacatgtattcccacttcactggccaaggtcacctgggacgggcccaaaccctcatctttgacggcttcgcgcatggtcagtgatcagtggtcactggtgagtccagtcaccttttacgggtggccggccgtcacaggtgacacccacctctgacgggcaagttactagaaggccgtcagaggtgttggtctccgctagcctagggcgagttgggacccgtcacaggtgactcatctctgacggccctttaaataaaggccgtcagaggtgatggtctccgtagttagaagctgtcacaggtgatctacctgtgacggccccaaaagtaaaggcccgtcacaggtaggtcacctctgacgggcctttatttgctagtccgtcacaggtaatgttacctttgacggatttttgttctgacccgtcactgatgagttaattctagaaaaaaataaatgctaaatattggctagcctcaggatttgctagccatgccctctgaaacacagatacatcacagatatattccagtcaccccccccccccaatataacatcacagatccatctcaagcatcacagatccccaacaacacagatccatatcaaaaaatgacatcattcacatatgcagttcaaatgctacaattttgcacagcaaattcacaccccttgaaagccacaattttggtcgttgctcatataactgcatatatacttaccaaatggattaaagccataatgtcctcgacctccacaacctgtcaataaggaaaaaaaggagaaaacagatgaacagtacaacgtaaatcgtagttgatcaaatttgatgacaatttagtaaactaccataaatattgcacatatgaaagtaaattacattgcactccataaaaacatattttttttacatcacaagaaattatgaaaacatcttttttacatcacaataaataatctagccaagttcatgagtttatttgacgtgaaaacgtcctttcttgttcattatttctgccagaatgaaggcgcacacttcgcctctgatagcggtgagggggggttgatgggtgagatcttgaagccagctctacctttctgtttaataaataagatgttggcacgttttgaatagcaatgttggtattgaaatgagcttattcgccattagcaacaacctcagggtcgaaatctttcacctctcttagaagtgttgacatgttgtggcacacgtggaaaccacattggtctccgatctgttgtgcgcatgtgaacttggtgtcgtggtaaagttcgtccttgccctccttgtgcctaccacccttttccacatatgggccccaagccatatttaaggccttggtgatttcagtgaaatcataatctttggacttattggagataaggtaggtaaccttactttactttggtacgatgactaggagaatccaatgtcgcctgcgtagtggttatgtagcgttagtactaagaaccttaactttaaaaataatatacacgaagggtattgtcctctttctcttggttgtgtgcgcacatgatgtacttcttgtcttgatgggcccataaacacaggttgacatagtcaaccacctcagtgaagctctgtcgtaaattaaccttgttcaccatggatggatcaaggaacccaacctgattaccaaggcgacgactctcgatccaacacaaccttaaaacatttacgtattagaactaatttaattaggagatatagtccaatcatatcacaagtatagaaggtatgcacttacaaggagtagtattttagaagaccagtgtccaacttccggatcttgaaaaggtcgaagaggtcatcaaagcctatagttatataggcaggcgacgataggaacagctggtagtcgtgatgtccaactatggatgactccctcattttctgcttggcattgcttagctccatgtattgcttatgtagctctcggcaagcaatacccatcacggctaacacattgtcctccaccaatgctatgcctagctcaaattgggctggcgccctcatgaccttccccgctttgctcaccggcatcgacgtcgcagccttgcccctttttgactccggcgccaactcctcgaccttccccttgccgcgttcacgcttctggcccttgacaagtggtggggagctatcggcctttcttgtggtctttattggagccaagctttgagctatatctgccaagtccatatcagctccaccaggagaatgaggtactgacaatgccggtccacggggagcctcaattgatagcttagacttgggaggtgtaagctctgtcggtcgacttggacgaggagtcatcttcacgactatatcttctttgggccattgtatgaatgtattgcgcgcatcgcccaaagtcatgatttcatcattggggggcacgggcagcggatagcctgaccaggtgtcctttactgtatcgatggacaccttggcatacccagctagcaggtctacgctgtggaccttgtctgtaaccgagggcttgaaagccatgcccccagcgacttcgggagcgaaagttgggtggaccctcgccagtaggacacactgtgctacgccctgcatatgtgaaagtctgaatttaatattggaacgtgtaaagttttttttattagatacggattggataacaatcaattacctctatgtggtccactgcagctagtggtgcgaccgggagaccaggggccggcacctctgtggatgcacaactactcttatgctgtgatggactcgcgtcgtgttgtgcatgaggagttggatgcacagcaggtgttgtgcctcggggtatattcatgtcggcgaggaccttgttaacactttcttccacctagcgttcatgctagcttctagttcttgaatgacctcaaccttaagttcggccttcaaacgagcgtccctctcttccttggggactttccgtttcctgtattgggagctgtaccgtgggagtccatgcttccagggcacatcgctaccaattcccctagtccggccaggatgttctttggttccgagtgccttggtgaggatgtcatcttcgcgcctcttcggcgcggactcaacctcgctttgtgaagcttgttcagcaaccaagcccaactagaaaaaaaacagttatttatacgaacttctactttatacgaatggaaattagttaggttaagtagtgaactcaccagttcctgatagacgacggcatcacttttgttctcaaatgtgacagagccgtccgggttgaccttacccctagcccgcgcccagttgcgagttctttgttcagggatgtctgaaaacgggacagggacattcgctgctgcagcggctgcatcttcttggacccatattgcctccttgccaatgtaccctgtggtgcccagccgatgtgggtgctcattccgctgttgcagtaggcgatgtgcctcgcttgattccctaaactcttgggtgttcttgagagaaaagaattcctcccacaccgcttcggttatttgagggtattcatcgaatggcatatgattgccgggcgggttgacaaactcggtgaagagcttcgacttccaattcttccaagctttgcccatcttctggaatgtcttccgcttgagcctatcctttgcttcagccggaaatgtgaaccatttctccattgccgtccaagctcgctctttctcggcttctgtgaccttgccgatatctttatggaggatcccgaagttctcacgtgccaccagcccgcagtagttagaccatcttccaatgacagtcctgggcaccgtgggcctaccactagcgtcaacctctcttataacttgcactgtggtcggccatatattttgtgaccggggatttctactcgacctacttgcacttgtcccgcccgacatcgatgtatgttgttcctgcggcaattttgcagcacaaacagaaggcaacatatgctaaggggtgctagctaaaatttatgtggtcatgtgatgaaaatttatcctataaattaccatgaatttcgggttgttcgaccaccgttgtcgagggatgaccttcggcaactgcctccgcggctgggtttgcttcttcctgtatcctcacaggtgttggggagggcgggtttgtgccgggcgttgtcatggtctaattttcgcgaaaaagcttataaatttcctactattatactaaatagcattagatccaatgtaatacggggtatactatgaaatatatggccttagttttgcttagaaattatgcatcaattaccatcatttgcatgaagggaaaaaaagaggaaatcataacatcaaaatctgttcttatgcataaaaaaaacaagtgtatatagtctcctcttatcaatctagaaaaaagaacaagtgtagaaaatctgttcttatgcataaaaaaagaacaattgtagatactttgttcttatctataaagaacaagtgtagaggtatataaccactgaatcaatcatgcaaatttaaaaaatagcagcagcaagggtacagatagaatgttattgacataaaacagtagcagcaggagtatatatgccacaggggcagcaacagcagggggaaattcacataaaacagcagggtgaacaagtagccacagtaagaccagtagcagggcaaagatagtccacaagggcagcaacaacaggggcaaattaactaaaacaacatgtctagatagtctcctcttatcaatccagaaaaaagaagaagtatagataaaaaaataaacaagtgtagttaatctattcttattgagcaattcatcactggccatttaacaaggaacacattgggcagcagcagcaggagcaaagatagtccacaggggtagcaacaacaggggcaaattaactaaaacaacatgtctagatagtctcctcatatcaatccagaaaaaagaacaagtatagataaaaaaaatgaacaagtgtagataatctgttcttattgagcaattcatcactggccatttaacaaggaacacagcagcaacagtagcaattgcagattaaaaaaaatgaacaagtagcccacaataacagcagtagcaggggtgtattaactggccatttatctagttaaaatcatgcaaaattcaaccaatgcaggaaaattaatcctaaaatcatctaatacaaaaagactaattcctctaatattgcatatatttcatccacaaatagtccaaattcatcatctcatatatttcacatctcaaatatgcatatatttcatcaaaaaaaagagacagtactactaacttcatctaaacagcaattcatccattcaattctagcaagtcatccatccaaactgcaattcatcaattcatcatctcactaggaggagggggcgtcgcacctggtcggcggtcgaggagaagaggtcggggaggcggcgtcttggcggccaatgttcgggtcgtggatcccggcgtcggggaggtcggggttggcggtggtcggcggtacagttgccggcgtcgtggatcccgacgtcgtcttgggaggtcggggacacggcgaggacgacggccttgatggtcggcggtgcaggccggtgtcgtggatcccggcgtcgggaaggtcggggtcggggtcggcggagagggcgagcggcggtggagaggagggcgtagagggcagcggagagggcggcgaatatggcggcggcgagggcggcggtggagaggtcgaggcggcggtggagagaagggcgtagagggcggcggagagggcggatttggcggcggcgagggcggcggtggagaggtcgaggcggcggtggagaggagggcgtagagggcggcgcagagggcggagagggcagcgagggcggtggtggagaggatggagtagagggcggcggagaggtcgagagaggcgaggtggcggtcgagagagtgagtgagtgagagtgggtgccggatctggatcgatctagaagatgttcaaccctagtcaaactcacctgtgacgggcgccaactatggggccgtcacagatggcctcacctttgacgggcgctaactgtggagccgttacaggttaggccacctgtgacgggcctaacactctgggccgtcacaggtgaggtcacctgtgacggccccacagttagagcccgtcacaggtgagtttgcctacagcaattttattttattttatttcacttagttcttttattttccttaacatatttccacatacactatatatttttgttatacttaattattttatttcactaacagtagtaattgcacttcattattttactaattctattattttatttccaatggttatactaatttaattattttatttcacttctagtgggtgcttaacttaattattttatttaactatttcatcagcaatatactattgattatttcgaacatattagagtcatacagataacagacatgtagacataaactacgtacataaattacaaaaataatccttcctcatggtcgacgcgtgcatattgaacgtcatcttcttcttcctcctcttctagaggtatttcttgacctatgccatggacgtgctggttgtaatcatcctcgtctataatattgtctaatccaacaattctccttttctcttcacgaacaacatgtagtttcttgttacacgagtcaactatgtagaacacttgaacaacttgtttggagagaacgaacggttcatccttgtacgcgttgttagccaagttaacagtggtgaaacctttcttgtcaacttttacattgcgaagatctacccatcgataacgaaacaacgggactttgaacttcaagtaatctagctccaatatttgctcaactctaccatagtattgatcacgacgaccaccgtcactagcagcctcgatgcgtaacccactgttctgcactatatatttgctgtcttgctttaccgtgtgaaaggtgtatccatttatgtcatatccttgccaggtggtggcactccattcaggaccctgtgacaaccactgaagtgtttcactagacaagttctgcaacctagcaattcggttcttcagccactcgttgaaagaagacatgtgcttatttctgacccaactctctgattggcctgggttctcctgtcggagaactgcaaggtgttcgtcaacgtacggcaccacctcagtcatatgctacagtaccatgaaatgagctttatcgtacaccttccgatccaacctaacagtctttcttccaatagtaccaacaccatcaagcctcccttcgtgatgagatagtggtaatccaattgaagatatttctgacatgtagtccacacaaaaatcgatgacctcttcggtggtgtaactctcgatgatactcccctcgggatgtgaacggttccgtacataacccttaaggatctccaggtaccttgaatgagcatggcaagcataatatactttcttttgaagtacaaccagggaagaaggttatagttaacaagcagaattggccatgtactgtgatgactgctcaaatcaccaaatggattaatgccatccgtacacattgcgaaacgcatgtttcttgggtcatttgagaattcctggtaaatcctatcgattatcctccactgtactgaatctgctgggtgcctcagcatactatcgactttccgtttttcggcatgccagcgcactagcttagcttgatccttattcgcaaacattctcttcatgcgctccgcaattgggagataccacaccacctttgctgggcctcccctctttgacttacttccttcaccttcactctttgctcgtttgtatctcgatgccccatagacagggcagacatccaagtcagcgtattccttgtaatacaaaatgcagtcgttcggacatgcatgaattcttctgacctccaggcccaacggacataatacttgcttcgcttcatatgtcgtctgaggtaaattgttcccctctggcaacaggtcctttaacaactcaagaagttctgtaaaactcttgtccgaccagccattactagccttaagcttcatgagttccaacacgcatgacaacttgctgtgcttcgacttgcatccatcatacaagggcatctgataatcttctaccaacttactaaacttctcaaaatctctgtcgttgtcctctgcgtcttcaatgtcatgcaacattgtagatagacattgagtgtctaaatctatggtctctccacctaaaggagaaggtacaaacatgccttctcgagctgcggcggtgttctctacatcctgatccaacacttcttcagctgcgacatcaggcgcctcttgctctccatgcttggtccagcaggtatatttcttcatgaatccattcattatcaaatgagcatgcacttcatcgctatcttcgatcatctgttcattcttacagtccctacatggacacaacatgtgcatgctcatcctactttttctgtcattatccgcaaatgtgacaaattcagtgaccccctctctatactcggtagacgaacgatgcgcatagtacatccatctactatccatctgaaatcaacaacatacgaagaaaaatatacgatgatcgatatattgagaatgaatggagaataatgtgttttttaccttgaattttagcaaaaaatcgccccccttgccctcctaaccgatttgtgaacagtgaactggtcaggatggaaagcagttggtggtttggggggtatttatagacccaacacacctcaaacgggttagattaaaaaagctcatcaaagatgttggtcatacctttgacgggcttcaattgagttgcccgtcaaaggtattgacctacctgtaatgggccgtaaaaaaaatccgtcacaggtggcagaccaccacctgtgacggctcataatgccacggcccgtcataggtgaggggataccagtgacgggttgggaggaaaacccgtcacttcctcacctgtgacggctttttcttccggcctgtcacaggtgaggggatacctgtgacgggccatggccggatgccccaccgatgacggtaaacctagcgacccgtcaaaggtgacggccatctgtgaccaattcataggcccgtcactggtatgccgtcacagatgtagggttctggcgtagtgtcctatcttattcctatgtttttctctattcgtgtggtttttcattcctgtgttccaaaggggaacgtcgtctctggtgagcttttgcactacagaacacagatgcattaaagcgatccatacaatcggctggttattggaatggcctccagttaatgattgcagatagttattaatttataaaccaaaaaatacaacattatataggtagcaatagcattgccctatcacagaagcacacaaatgatccagtccttgtactacaaagattatttccgtctgctctatatatgttcaattataatccgtatcatcgcctctgctacaaccaagtatagagatgtacgcttcatgtcccagttcgatcgcaggcatgggtggcattgggaatcccatttgctcgttctctggacagatcggtgctccgtttgggttgcttggtgtgcacacggccagtgttactgtcagaaaactcacgcgaactggctctcaatctcacagaacacacacactgacgcttgcaggtgcagctacagttaactgaacaatttttcagtaaaacagagcagaacagaacaactgacgaacagagttttcgctgcgtaatgccgtgcagcttttccagttttctcttctatttattcatctccacacggagtttgttgcatgcataacagaatcacgacaatctcggatcaactactgaccgcgccatcccacgatccgagccgagtcatcgcagctaaagaatgaagcaaatatgctaaaacagaaaatgctattctaccggccagaattcagactccaactgaactctacatgcaacaaaacaaaacagaatataaatgctcaggattacaatccaacaattcaccccctaatcttgaagcatcagactggaactaatcccagcttgcctctcaactccagaaatcgaatcttaccaagaggctttgttaaaatatctgcaagttggtcctctgaccttatgtattccacctccacccgtttttgatcaacacaatcccggatgaaatgaaactttgtatcaatatgtttactgcgatcatgaagcacaggattcttgcagagacttatagcagacttgttatcaaccttgatcagtgcacaaccaggttcttggccttccaactcacctatcggtcgagccagccatactccttgtacagcagcagttgcagcagctatatattcagcctcacacgaagataatgctaccaccttttgtttttgtgactgccaactaatcaaactgtctcccagtttgaatagaactccggttgtactctttctatcatcaatatccccagccatatcactgtcactatagccattcagctgaggaacctgatgctgcttctttctgaattccaccccgagattcagagtacctgccacatacctcaaaatatgtttcatggcagcccaatgttcagaggtcggtttctccataaacctgctaacataaccaaccgaataacttagatcaggtcttgtgttcaccaagtaccttaagctcccaattatgcttctgaattgagtttcctccacacattctccaccctccttgctcaacttcaaccgagcatccatgggagtctgacatggattacaatccctcatcccagctttgtcaagtatctttgctgcatatgcaccttgagacactgtgatcccttcctttccctgtttcacctccatcccgagataataagagagcagaccgagatcactcattttaaaaagagcttgcatctgctccttaaacttgtttatttccatcagacttgctcctgtaataatgagatcatccacatatacaccaaccacaagtcgtgagttcttctctccttgagtatacacagcactttcgacaccactcttgacaaaattcaggctcacaagactagaatccaatttggcataccatgcacgtggtgcttgttttagtccatatagggccttcttcagtttcaacaccttgtcttcttttccatcaacaacaaaaccaggtggttgaaccacataaacatctttttccaattccctattcaagaaagctgatttcacatccatgtgatgaacttcccatccctgatgagcagccattgcaatcagcaatcgcacagtctccatcctcgccactggggcaaacacttcatcaaaatcaactccatgttgttggacatatccctttgccaccaatcgagctttgtacttcacaatggcatctttggcatcacgtttgattttataaacccactccaaccctattgctctgtggctagagggcaaatcacagagaaaccaagtgttgttaccttcaattgagtccatctcttcaagcatggccttcctccagcagctctcctgctcagcctccaagaaatttgctggttcctctgctgccataaggcattgatcactgtaatcaaaatcaaggattggagctgtagtggcaagcgtgtttgccactgttctgtacctcctgggcccttcattagtcccttcactagcatcagttggagaggaacagaattcaacaccagatggcagagttattgcagttccggtgcttgatgttggtgatgttgctagcatggtaggagtgactgctgcatcctgggcatgtgtctcacccccttggactgggactgtgaaattctccaccgtaaactccacataggcatcctgatctccttcttcatcagtgttgctgccccagtcccagaacgtcgtcccatcaaaaatgacgtcgcgcgacacacacaggcgtcgcgccacaggatcatacatcctgtaggcttttgatccttgctcgtagccaatgaagaccatcctcgtgccatgatcatcaagctttctcaagtttggcttggccgtcttaacatagcccacacacccaaacacacgcaggtgttcgacagtgggtcggcgaccatgccacgcttcatacggcgtcaccccatcaagactcttcgttggtgatctgttcaggacgtagacggctgcaaccaccacctctccccagaaatatgccggcatgtttgccgccttcagcatggacctcgccgctgccaccacagtctggttgcgccgctccactacgccgttctgctgcggtgagtagggtgcagtgagttgacgcttcacccctgtatccgcgcagtactccatgaactctacagaggtgaattcacccccgcgatcgatgcgcagcgccatgagcttccgattgctctccttctccacgccggcttggaactgcttaatcgccgccgatgcttcgtgtttggcagagaggagtcgtatccacatgtgacgactcatgtcatcgaccaggagcaagaaatacttcttgccccccggcgtcgccggcgtgattggtccgcagaggtcaccgtgcaccagctcgagcgccgtctgtgccctgtactatgcctcctctgggaatggtgtgcgacgttgtttgcccgcgaggcacccgtcacacaactgatcattatgatcaatttgctggagcccgcggaccatgcctccttgtgccaacctccgaagtgcctgaaaattcagatggccaaatcgtgcatgccatcgccatgctagctcggagccgttcgccgccatatagattggtgtcgcaagattaaacttgagaacatacaggtaacttgaatcacgatttaccttagctagcagcatcccttccgggtaacgcaacgtgaaaacaccatgccaaatgtgtgcgtcgtagccgcgcgcgtcgaggcgaccaacactgacgatgttttttctcagcttggggatgtagtacactgcctccagtgagcggtgatcaccattcttgcactgaaacaccacagttccgtgcccctggatgtcaatcaccgagccatcgccgaatttaaccgtgcccacaacaccagtgtcaagctccgcgaacgccgagcgtgcgcccgtcatgtgattcgtggccccggtgtccaggaaccactctgaagtcttctcctcctcacgcccatcctcgcggtcaagcacaaccttcttctccgtgagatgcacttcctgcacacaaggtgttcgaccaatggccgcttcgccggcgagcgacacccccatcacgtgtgccatgagcagagttggttcttcctcagcctggaccagattcgcattcgcctctccccgacgttggcgacgcggcttacggcactgcttcgagtaatgaccgtattcatcgcaattgaaacacttcaccttagagatgtcacgacggccatggccgccggtggccatcttctttcccttcggtgaatcgccggccttacctcgacggttctggttgctagagcccgcccggcccttgttgctgctgctggatccctcctgctcccgctgcttgacacgggcctgccactgctcctcagtgaggtacaatttgctgccatcacttgcctcctcgtcatcactgtaagagtcgaccgtcgacagccgcccgacgagctcctccagggccatggtcttcacgtcgaggagctgctcgagggaaatcgccaccggcttgtacttcttggggacaacacgcagcagcttcttgttgatgtgttcgtcttccatgactccgcccatgtcgcgaatgtccgcaacgacggcagtgagccgcattgcaaattcctctggcgtctccccgtccttgaagcgcatcgcctcgaactgacggcggaatccctgctccttcgcctcacgcacgcggtcgacactgacccgcatggttttaatggcatcccacgtcgccttcgccgaattgtgcttcgccaggccacgcaacatctcacgcggcacagcttggagaatcgccgagagcgctgcacgatcctcgcggtactccgcgtagccaggatcgatggccgtccagagcccctgcgcctgcaggtttacgcgcatcaacagtgcccagtccggataatttgtcctcgacaggatcgggagacgggcagtgtgcccagcatctctcccctgaggcactagcgggagtgatgcgccgtctgcgcaattccccacgccgctgccgctcgcgctgccgcggccgttgccgcttcccccgccgccgccaccaccacggcggccaggcggtgtgtatgacatcaccggatcgtctcagcaaagctctgataccaaatgtcagaaaactcatgcgaactggctctcaatctcacagaacacacacactgacgcttgcaggtgcagctacagttaactgaacaatttttcagtaaaacagagcagaacagaacaactgacgaacagagttttcgctgcgtaatgccgtgcagcttttccggttttctcttctatttattcatctccacacggagtttgttgcatgcataacagaatcacgacaatctcggatcaactactcaccgcgccatcccacgatccgagccgagtcatcgcagctaaagaatgaagcaaatatgctaaaacagaaaatgctattctaccggccagaattcagactccaaccgaactctacatgcaacaaaacaaaacagaatataaatgctcaagattacaatccaacagttactactgatgaacactcctgactagtccacaaggtagcacgagaaatatcgctgctgatcaatagacagtaggcacatctcgatcaggcctggttctttcttaaatcagtaagaaaatcatcagggtcttccgactagctttatagggcggtgggttggcccgcctgggttagaagcctcacaatttctatttatttgatattagaccattttctaatattcgtgttttttttctttgttcaatcaatggaaattcaacctgtagcttcttttaatttctaatgccagcagaaaaaatatggatcaagacaacttaggggttgtgagttagcatagggccgggatagtacattatacagtagacaccttagctgctcctaatccagtacattcttttccaggtcatgggaacgaaagggaccagaaatacagatcaccggccggtccttggacaccttcatggcaagagcactagttttggccatgcagtggctggttggctgcagtagggccgatgaggataatatgctgatggacagcgaaactgtagaatacaactgtgtatagcatgttttttggacgagcaactgtatagatgttgtctctgtggctgtcgaaatcttcccgctggcttcgtgaaatgtttcctcattgcgaaatgttttctcatccagattcagatttcgggaagggacgtgtattagggatcttcgagggggggggggggatcatgcatttcgtgcaattgatattaattcttgatgtctgtaggaatttccttgtcaaaaatgttagtaaatctggtcatctgtttaagtggaagtaaattttaactttcatactataaactgtataaggtacaagtggccagagttaattttgaattttagaattattaaaatagaagaaaaaactaaaatggaaaccgtacaacttatatatatagctgtctagcatagcatgttttccatggcctcaaggaaattagaatatgtattctgtctattgccgaaccaaatgaatgaacaatttgtaggtttggggggcaccaggagttcatgtcccacagcaccacttttgcagtggatgacaaatgacaattcactccttgattctgtaaaagttcatcggtgtgccactcaattgctccgtcgttccgaggacatcttgatccgtcagatgcatattgcatcatgagctccggcgagcagatgattaaagtatcatatttcataagatagttttacttagccatccattggaatgtgttacgtttcatgctcgtgaaatcaagctcataagtaagaagcttagccccaatgcatggctcccaagtcatgaaaacttattatatataatcagaaaacgaagcgatccccgtccttccattatacgttcgaaatgtctactgctggaattttacgtacataacagtgtatatgtcttttctcattacaaagacatgtcagtgcacacatccgccttctgtagttgaaggctatcaagctcttactacgtcattgcacgcaagaaaaaagatgatatagtatagtttgacaagttacagtgccactatatcagtccatgacattatatttatcttctatctatctatcttctatctatctatctatctatcttctattatatactaaaagtccattaaactttctataaacgctctcaagccgccacgtggcacttctacaacgctcctagatcgccacgtggcaatgtctaatcacaccgtcaattttcacttaaatcggtggacccaataatttggaccattagattagattacatgtattatatatttaaaaagaaacaaataccttactgttcaccagaaaaaagaaaacaaaagcatatgtactccatatatccatatataggtacgtacgtagtatgcaaagactaaaaaataatcaataatcttacctactgttcattgtaaggaaaaaaaatacacacagacttactataaaaaaacaatagagccaaaaaaaaaaacgtacgtacgtactaccaataaaaattgattatttttaagatagatttttttcgactatttaaagataaaacctattactctataaatttaagcaaatatagctatagattttgacttaaatgggtgaatctaatattttaaaccattaaattagatgtatattattttaaaaactaataccttattactctgtgtacataaacgggagaaatatataactgttaggctagaaaaagaaagaaaacacataatctcatcgtcgttttcacttaaataagtggacctaataatttagaccattcgattagattagatgtattttatttaaaaataaactaataccttactgttcaccagaaaaagaaaacaaaaacaaaagtatatactccatataggtacgtacatacataagactaaaaaacaatcaatcttacctattgtttattaaaaaaaactacgcacagctatagaaaacaataaagctaaaaaaaatatacatacatagtaccattaaaaaaatcaattatcttttaaaatggagttttctactatttaaatataaaatctattactctataaatttaagcaaatatcaccgtcgattttcacttaaattggtaacccaatatttttagaccattagattagatgtattttattttaaaaacaccatataactctgtgtatgtatacgggaaatataagtagtcagtacgtgcatatgacctgggaaaagaaaagaagtttacctactgtccttcaatatctactcacggtggttttctgaaatagtattttcaaaatcacttactataaaaacaataaaaaaatatgtatcattggaaaaagatcgatggtcttttgaaatagtattatctactatttaaagataaatatattgctctacaaatttatgtaaatatacgtagttaaactaaatttatattataaatatgaaatatcccatcaatgatctttattcgttctatcttaacatacaagactaatgtatataataattaatgctatgatatttttttgtcaaatatcacttgacgaatatacaacgctaatttaaatcaatatttgtaaaactgaaaacaacacaatttagttgtttcattttacaccattagattagatttattattgacaaataatacaattctcctatatacggatacatgaaaaatatataactgttgaccggaaaaagtactccgtacatagagatgattgaaagaaaacaataatgcttacatatcgtctgacggaagggaaaaaaaagtacttatgataaagtaaaacaatcggaagtctttaaaaaagatttttctacaatttagggataatacccctaaaaaacaatttaaggataaaatataataatcttcaaatttacacaaatgtaaatttaaaatatccaatcaatgattttaagcgttctatcttttaaatttttttaaaattatttatccaatttgtgattcagtagtattcctttaaataaataaactattactccctcattccctaaatgtttgacgccgttgacttttttaaatatgtttgaccattcatcttattcaacaacttttgtgaaatatgtaaaactatatgtatatataaaagtatatttaacaatgaatcaaatgatagaaaaagaattaatagttatttaatttttttaataagacgaacggtcaaacatgtttaaaaaagtcaacggcgtcaaacatttagggatggagggaataatatctataaccctaaatgcatcacaaatttggagccaacatgtaataattaatgttatgataataatttcacatcacattttagtgtaagaaaccacttgacgaatatataatgctaatttaagtgtacatatgtcttatccaaattactaaaggtgtctcatgtgattagaacaataggggctgaaaacaaaacagacactgaactaacatgcactaccctatagatatttgtcaaagtatgataccgtactttggattatcgtgatagtattttaaaaaaatcactttctctcagttacatataaattcttctattattttggaataaaagttaactccttccatttatgtgacggtggtaatataagtaatataagtctatgtttgattagatgaagtagtatcattagctatatttttaatagtaaatatctttcattaatatatagtaaaattaaaatgttacttaaagtcatctataacatacacaataaaaaaagttatataaagttgggaaactctagaaattttaaaaaaagaatcacacataacacaaatagatatgaactaattctattattgtgacatattttttctaataaatttgaggatatacattttcaagtaatacgcccaaaccaattattaacgaacatacgttttaaatagagtcaaaaaaatatttcaaaaatatgatccacacataaagattcgtaataaaagttcaaacaatattaaacaacatgcccgcgcattgcgcgggctaccttctaccttctggttcaacaaaaaagacagcgtgtgttaagaacttcctgtaaaaagagatacatgaaggctgcagattcagcgattattatgcttgcatatgaccctacacggctagcgcagtcttcgttctttgcttgcggctagcgattttatctgtgggactgagagtaatctggaaatcaggtgtcgatgctacacgctgagacagtataggagtatccatttcgatatgccatgcatgcaaattcagcaccatatcctactctcggacaccaacgactgtaagcagcagaacaacgagaggggacttcttcgcaacaagatcgtaaggctcgttagagttccgcgcggccatgctcatcagctgaaggatgcaggatatatatggcaaattatttgaggtgttttggtcattttggtttttgagccatgtcaaatcaacatcaccttaacgcatcgatccaccatcaaattatttgagagtatatatgtgacgttctctttcaattgataagaggtaccaaacatttttaataaaaatcttttggctcctctccgtgtcttgctagtgctcgatcggatactgggagttatgcatgatgcagaagctgggatttttattccattatctgaaaacgataccgggagttatcgctaccactgtttttttaattaaattactgtaggagattatcgctagcagtattaagcaccgaaacttgatggtggataccgtgaaaggtacagtggtacgggttaattggatccataccactataattgtggcaaatcagaaaaataccactactatttgtgttatcggctgggtaccactgaaaatttctaaaattaaaatcatgccactcccttcactctttccgtcctcctctctcatcgtcagtagcagaggggtgcggggagcgggcgcggccgcggccgccgccggcgaggacggtcgaggaggggcgaggatatggcggaagagctcattgacgacggggaaggagataccatggccgccttgccttctccccgtcctctcgctactcgccggcgccgcctcatcctcgccgctcaccggcgctgcttcgccttatccccgtgccgaagtgagagaggaggatgacgatgtgagggaggatgacgatgtgagagaggaggacggaaataatgatgggagtggtatagttccaattttagaaattttcaatggtacacatccaataacgcgaatagtagtaatatttttctgatttgctatgtttacagtgtcatggacccaattaaccctacttcgaaaccgactctcttagtacgtacttggtcaatcttaaccatctgtaaccaagtgcccttgttaggtagagcaatttatcaccacacgcacatacacgtcatctgtctattgaattacattgtagatagttcttggaatgaataattagtgaacatgactctgtttgttcatctttgactttctcccaaaagccggatcaatgcaatttgatctgtcctaaaaaaataataattagtgagcacggatagatacaacccaacatcaacttggctttaaaatgacagtagcacgaaccaaagtcttcctgtgagagctatagcagaagggagagcagatagtagccaagtcacgagttaaagggcgtgcaagcctgcagagcacctgctacacgatatgcacacatgatctcctgcaccggtgttcgtttccagatgatgggcatgggaggcaccgggaatgaactcccctccttttgcttgtgaccctgctcacacaaacagtgttgttcgccccgattcatcagctgcagcagggtcgatgactcgatgcacacggtcacaaactcacagactcgcagacaacaatttcatctaagcttggggatttgttcctgcgggctcacagtagcagggtgtccctttctacgtgcaaagcttgctaattctgtacgatgtatttctcttcaccacgaacatggcatttgcagcgcgttcgtccgatcgggaaggaaacgtgcctcgccctgcttgtgagctgtgaaccgggagcgacaaatatttttattctccatatacccttctctattaaactatatcatccttttaatttatactccctccgtattttaatgtatgatgccgttgcacgatctatcacaaaactacaggtttaagaatatgtttcacaaaactacagtttcagtgtattcgtttatcataaaactacagttcacaaaacttcatatttaaaaacttgtttaacaaaacaacagatttaatatcttcatttatcacaaaacaacatgtttaatgttttcattatcacaaaactacaggttttaacattgttaaaacctgtattttttatgataatggagatactaaatctatagttttgtgataaataaagacactaaatgtgtagttctaggataaatgaatacactaaatctatagttttgtgaaacaaattcttaaatatataattttgtgaaacaaattcttaaatatatagttttgtgaaacaaattcttaaatatatagttttgtgatagattttgcaaagtacatgtagttttaggatatatagagacactaaatatttagttttgtgaaacaaactcttaaatctgtaattttgtgattacttatgctaaatacctgtagttttgtgaaatttactctaaaatttataaaatgcatgttgttttaccttttttttcatttatcctatatatatctataaagtttatccccactaagtgcaattaatactaattctctcttatctcatgaagccatattatctcaattatttttagcctttggatgattcatcaatggtgtaaattgcatctcttccccctcaaaaggtacaccaaacaattcaatcatttatccacatttataaatgaggtatagctattttgtcattgtatggctatttggtactcctagacagtaccttatctaccacttcaaactgaaggaagaatttaatattagctagtagtatgataaactgcagcctaaagatatgtgtaattgttgtgcttgctcgaagtgagagaatgaaccagttaaggaaggatatattcatgtccgatggagttgtgtgccatgtgttacctctatgaggattgggacatgcgcgagacttcagggtcagacgagttttggctactaattgaacaaatctttatatactcctcacgatccaccctagatgcatatacagggtacatctttaacatattttctttatcgttaggcgtagcaggcgtccggaagtgatctggttatgagatggtatggtgcgcaaacagtaggacatgaatattctcctggaaagataaaatgattcctgatcgagatcctctaacttacttccctgtaacttgtatcactgacatgtgggtcctctatccaatgggcccggacatgtcagtgacttaaagctagaagaaagtaagtcagaggatcctctttcaaggactccagttgcaatagtctgccctctaacactccaataaaattttgaacatccaattcatatagcgattttaataaaatcttagcaaaattttgagggtgatggaaagcatagcaatcttggacatcgaagtctcgtagcaggcaaggccgtccttcatttttgaggggattgaaaacaaacggggaattttggaatatccaaaactattttctccttttgtacgaacgaagagagaatgcttcggccaacccggctataaatatatggggaatatgcttaaactgtgatagcctattatcgtcggagacagctcaaaattggcaatatagtagttgaaaatggttaaaggagcgtcatctatgatgatcttgcactgtaacacacatagggtgcaagccggacgggcaagctgggttttttttcgcttatccacttctagttttttttttctaaaatttatactaccatgcatataaaaaataaactaacaagtaggattttatgtgggtaatgggcttgctcacttacatccctaaagacacacgcatcaaagtggtccatatatacattcgcctgtattcttgaatggcctctagttaatataatggtgaagcagaacagctgggtgtagctgcgtggttgcagtgttactataaaccaacaagtacaaaaccttatatatgtagtagctagcatgcccgatcacaggagcacacacaacacagtccaatccgacgacctaagttcgaatccccaccccttctaattatttgatattaggttcttccctaatattcgagtcttttttttactgctaggaaaaaaattccacctgctctatgcatgttcaagtaatccatatcctcgatcgctctgctacaacaaattaaccaactagacatatgtttgatgttccagttcgatcgcaggcatgggcggcaccggggatccctctcgctcgatctccggacaattcggtgctcacttttggttaatcggtgcgcacagggcaggtgtttctaccgatccacattcctgagttctgactgttgaaattataagcacaaaatgatttaatttatttcataaataaatcatgtcattgcatatgtaaacttgattgaacgcatcattagatctatacatgtaaactatgcagtaaaacatgaacagaccaaatatgcgcaacatgtcgaacacgtaccgaggtggcggaaagaccggttgctcggcaggaactactcgcggttgcgagcgtcgacgaaggcgcgaagcacgcgagcggagaggaaggtgagccatcgcggacgaacagggagcagtcgcgcgaagcgcttcccaaaaaccttattgccgccttctcctggtgcaggatgtcgaaggcagagattccggagacctgctctcccaatcgccggtgcacgccggcgagcgggatagagtagtctacaagcgacggcgcagcacatagtaggaggcaaaccctagattgatttcgcgtgtgttgtgtgaaggcgacggctcggtttatatagagatagatcgcctgatcagggcgcccgagtaaacagaactggataagtcgcgcgtaacctatctggactctatgccgttttcacgcaccggatttttcggaatgtttctaaaacaaaacaaatccgaatttcccgcagcaaaacaaaactgcaaaaggaggctgcatctgcgcaagggtgaggaaccaatttttcggaccattcgacgcgtacatcgtgcacgcgcaccgcctgccctgccaggctaggcgaggcgggacgagcgagcgcgcgcgtgtttcccctcttctttccaccatacatgcttcaagtggctaggagagcatcctcccttttaagtaggtccccctctcctagaataagcaaggtggtactaaactccacatgcatgccatcctatgaggtgggcttttgtgatttttcaaagaattaatctttaaatgggccttagcccatctattaattccaacaatcccccaccaaatctcaaaatcccactgagatttgccttttccaatgtattgtttatataccagcagttcgatggagaccgattaaggttgaacatccacctagaacttcaagctacacttactcacaacttgaacaatggactacgccttaaattgcaagtcttgtgcaagcaagtttcactcagagtcttatctggtactagaccatctgtagactacccctcgggtggagcgtataagtcatactcctaggtctttagtaagcttcctagaagattcacccaaaatctccatagactgcgaccaacagtcaagcttacaaaggtgagttctttcaagaatgctctgcaggacagcatcttcgctaactaaagccaacagaactcattaaggcatagccaacctgccttgcagctcacgagagtatatgcatcttcaattagagaggctatagattggtactctcctctagtttactaatggtttgttcttcccaggttctaattcacgggatctccgatcacatagactgggttaccaccatagtataactcacatgggtctcaaacccatctccttcgatgcattatctatcacatttcgtgatagtcccttcgtgaagggatctgccaggtttctagctgtttggatgtaatccaacgttataactccggagtttctcaatttcctgacagacttcaatcgtcttttcacatgtctagacgatttcatattatccttagaactattcactttgacaattaccgtttgattgtcatagttcataaggatagccggcaccggtttttcaacaataggcagatccattaatagatcacgcagccattcagcctcaacagtagcaatatccagtgccgtcagttctgcttccatggttgacctcgtcaaaatggtctgtttgcaaaacctccacgaaacagcaccaccacctagtgtgaagacatatccactagtggctttgatctcatccacatcagagatccagttagaatcactataaccctccagtaccgcaggatacccattatagtgaagccccaatttcatagtacctttcagatagcgcattactcgctcaagcgcacgccagtgatcatctcccggattagaggtaaaccggctcaacttgctcatagcaaaggagatatcaggcctagttgcactagccaggtacatcagcgagccaatgatttgggagtattccagttgattcttagcaattcttttgttcttgcgaagcaacaagctaggatcataaggtgttggagaaggcttactatcaatgtagccaaagcgattcaagatcttctccacataatgagactacaagagtgtaatcccattctcacctctaattagcttaatgtttaagataacaccagctactcccaaatccttcatatcaaaattttgagacaagaatgatttaacctcatttatcacctcaaggtttgtcccaaatatcagtatgtcatcaacatacaagcacagaataactccctcacccccaccatggcgatagtacacacatttatctgcctcattgactgcaaagcctgcagatgtcaatgttttgtcaaatttctcatgccattgcttaggagcttatttcagaccatacaaagacttcaacaatttgcacactttgccttcttaaccttcaactacaaacccatcaggttgatccatatagatctcctcatccagctctccattaagaaaagttgtcttaacgtccatttgatgaacgagaagaccatgtgaggctgctagggaaagtagcacacgaattgtggtcaatctagcaacaggtgagtaagtgtcaaagaaatcttcgtcttctttctgagtatagcccttagcaacaagccgagccttgtacttttcaatagtaccgtcaggcctaagcttcttcttgaacacccacttgcaccccacaggtttacacccacagggtcgctctgtcacctcccaagtcccgttagcgataatggaatccatttcactatggacagcctccttccagtagtctacatcaggagatgcatatgcttctgaaattgacttaggagtgtcatccacgaggtacatggtgaaatcatcaccaaaggacttagccgtcctttgtctcttactccttcgaggagcttcactgacatcctcctcagtgacatgttcatgtgtatgttcagtttgttctggtggtgtgattgaactgggaattactttagagggttggctcgaactactatgtgtatccttcattggaaaaaagctctcaaagaaggtagcatcacgagactccataattgtaccaacatgcatgtcaggtacctcagatttaactattaaaaatctataggcaatgctgtgatgagcatatcccagaaagacacagtccacagtcttaggtccaagtttgcgcttattcgttattggtacattgactttcgccaggcacccccatgtgcgcaaataagaaagtgatggttttctcccaatccatatctcatatggtgttctgtccttatttctgttaggaactctatttaacacatgattcgatgtcaacaatgcctccccccaccatgccttaggtagtcccaccgtgtccaatatggcattcaccaagtcagtcaatgtgcggttcttcctttcagcaatcccattagactcaggagaatagggaggcgtcctctcatgtatgatgccatgttcctcacagaataagtcaaactcgtttaagaaaaactctccaccacgatcagacctaagcctttttatctttctgtcaagttgattttcaacttctgccttataaattttaaaatagtctagagcctcgtctttcgttttcaacaagtacacatagcaaaatctagtagcatcatcaatcaacgtcatgaaatatcgttttccacccttcgtcaacaccccattcatttcacaaagatctgaatgtaggagttctagtggtgccaagtttctctcctcggcagccttgtgaggcttgcgaggttgcttcgattgcacacaactatggcacttagaacctttaacaatggaaaacttaggaattaaacacatgctggaaagccgagacatcaagccaaaattaatatgacataaacgtgagtgccaaacataagcttcatcatccacactgccacaaatatggttcacagacttattgtagaaatcagaaagggaaaaacggaacaggcctccgcactcataacctttaccaataaaatatccatgtttagacacgactactttattagactcaaaaaccaacttaaatccgtctctagtcagacgggagccactaacaagattcatgtcgatagaagggacatgctgcatgttcttcagctgcacgatctttcccgaagtaaacttcagatctaccatgtcaacaccatgaatagaagcatgtgacccattccccattaggacggtggaaccccgtgcgacctgataagaagaaaacaatgagatgtcagcacaaacatgtacattggctccagtatcaacccaccaattagtagactgattaactgaaaaaacagtaggtaaattaccatacttgcttccatctccagtattattaccatacctgcttccatctctagtattgccaatggtcacattagcagacttagaagtctgccttgtaggtgccttcatccccttgcgttgtggacacttcctagccagatgaccaggttgcccacacacaaagcaagtcctctcatcctgattaggattgatgttgttcttcttctgcttcttgaagttggtggtctgttgagctttgtatttccccttactcttgttctgggccttgtgcacaacattggcactgcccaccattgcccttagacgcggcatttttttcccgagctttctcctcaacatcaagagacgctatcaacccctcaacggagtattcctgtctcttgtgtttgagtgcagtaccgaaacttttccatgatggaggtagtttcgcaataatgcacccggccataaatttgtcgggtaagacacatttaaggagttcgagttccttagccatggtttgtatctcatgagcctgttcgactacagaacggttgtcagccatcttgtagtcatgaaactgctccatgatatacagatcattgctagcatcagtagcaccgaatttagtattcagtgcatcccacaactccttagcgtcggtcatatgcatatacacctcgaccatacgatcgccaagaacgctaagaatgtatcacacaaagagagtagtggcttcctcgaattgcttctgctgatcagcagtaagaattccttcacgtttgctagtactcacccagaagcatttcatagccgtcagccacagagtgaccctgatctgccatctcttaaagtgcacaccggtgaatttatccggcctcagtgcatcggcaaaaccagccatagtaaaatcacagcgcctataataaggtttttggattgttgaaattataagcacataatgatttaatttattccataaataaatcatgtcattgcatatgtaaactagattgaacgcatcattagatctacacatgtaaactaagcagtaaaacatgatcagaccaaatatgcgcaacatgtcgaacacgtaccgaggtggtggaaagactggttgctcggcaggaactactcgcggttgcgagcgtcgacgaaggtgcgaagcacgcgagcggagaggaaggcgagccatcgcggacaaacagggagcagtcgcgcgaagcgcttcccaaaaaccttattgccgccttctcccggtgcaggacgtcgaaggcaatggttccggagacctgctctcccgatcgccggtgcacgccggtgagcgggatggagtagtctacgagcgatggcgcagcacagagtaggaggcaaaccctagattgatttcgcgtgtgttgcgtgaaggcgacggctcggtttatatagagatagatcgcctgatcagggcgcccgcgtaaaccgaactggataagtcgcgcgtaacctatctggactccatgccgttttcacgcaccagatttttcggaatgtttccaaaacaaaacaaatccgaatttcccgcagcaaaacaaaactgcaaaaggagactgcatctgcgcaagggtgagtagctaattttgcggaccattcgacgcgtacgtcgtgcacgcgcgccgcctgccctgccctgccctaccaggccaggccaggcgaggcgagcgagcgcgtgcgtatttcacctcttctttccaccacacatgcttcaagtggctaggagggcatccaaaaaaataagttttttggatcaacttatttttgaagtctaccataactaattgtaatttaatttaaaccattaatttttaaaatcaaccataacaagtttgaactgaatatttaactattaatttattttgtcttaaagtgctaggttaaaaaaaaactaggcttaaaatcccgactgtcacaacccgtaaacgcttgactacaccttgacgtcccacacgaaagaagtgatatttattggcattccatatgttcgtgtgtcccaaggtgttacattcaccgtaacgttgttttcgataagaatatacatgccacacgtgctgctaagtgctatgtctaataagtcatctctcgactaggtcagataatttgttcgctcagaggagatccaaccaatagcttgtcttaatataaaatgctaggagaaaaaatatggaccaagacaacataagagcttgtgtgagctagagtagagctaggatacaccagagaatagtacaccatacactatactagagtatggacatccacctaatagctgctcccaaaccactacattattccctagataatgggaatggaaggaactaggaatacagatctccggtccttagacacacgcatggcaagagcataagttttggtcatgcatcggtagtagttaggccgatgaagaataagctgatggataggggatctctagaaatccaactgtatagtaagttatctactccctcctccttcccatgtttgacaccgttgacttttttaaacatgttagaccgttcgtcttattcaaaaacttttatgaaatatgtaaaactatatgtatatatgaaagtatatttaacaataaatcaaatgatacgaaaagaattaataattacttaaattttttaataagacgaacagtcaaacatttttaaaaaagtcaacggcgtcaaacattttgggatggagggagtatcttgttgtcgaaatcttacctctgccatcaggcgctgtagtgcacgtacacagttgccacggcgaaactctgatatgcaatgaccaacgtacaatcaacatcgtgaaatgtttttctcatccagattttgggaagagacagtacgtgcagccaggaatcttcaagggtgcagagccgattatacgtactcgtgcaattgacattcccagaggcctctagaaatttccttgtcaggaaagttttaataaatctaatcatctgtacaaagtgatcagtgttagagctttatcggttatccatattccttgataaactaaaactgatttattaggaaataaatattaatctataggtaaaaattttatatgtctgttcgtaacgactaaaagccaacaaaaaagaaattatgttaaaaatatcttaaaatcaactttaaaattaagttcaaaaatttaaatttaggctttttctttgacttactagaccaaccgatcgggctctaaactttggattttaaattattaaattagaagaaaaacaaaaaatggaaactgcgtgcatcttgatattaagagaacctttctatatgattacattaaaatgtggtatactcaactatgtgattaaatttgaatgtggtatactgaactatatgatatagtcaaaaacgtattttggagattgtgtcaatatcctaaacattgacaactatggagggagtatgtgtttcttccaattggaaatgggaagagttgcccctttgtagcttccaaaaaataattaagagaccctaccaacatattttccattagtaattatgagttttagaactgctaatgaaattaattaaattgattattttccgatttcaaaaatggtttactgaatagtaaatttgtttgtatgtgaatatatgggcagaaacataagatttgacatcgccaattataaacatgcaaagttttttgtgtattgctttgtggttggcaccgtcatagatatataagtgatctaccagagtgctaaacatggtcatgcatgttcgattggataaatgtgtgtctgtgttagtgtgaatcgaacatcgacgatctcaatttctatggtagcaaacaaacaaaaacttatggtaaaacgcaaggagattttttttaagagaaggatactttttacctggcctctacatccaatcagatatacactactgcgaaaaacatctttcgtggcggccattttgagttttcgatggtggaatttggagccgctacaaaacaaaggccagcgaagatcaatatcttcgcttgcggttatcgaccgccaacgataattcattttcactggcggtcgtcttaagccagctgccagcaaagatccattttcactggcggttggcttaagacggccgccagcgaaaatgaattatcgctggcggctgtgttaaatcggccgccagcgaaaatctattttgggccaaaaaaaatacccatgcagccgcccagctgctagcgaagatgatctggagaaaagcgcattgatttattttcaaaattcaaatccacatctagagatctagattcgatgctcatttccaaattcaaacacgaaaaacaaaatcaccattagcatagatcaaacatcatttacacatatcaaaacatgtgcattatctggaacaacatgcacaaaaaaaaaatcaaatcagagaggagggagctgggagcacgaacggtcagtgaggagggagacgggagcacagggcagcatggtcagagaggagggagcagggagcacggggcagcatagtcggagaggagggagccgggagcacaatcgacagcgtcgaggtctgtgccgtcctccccatggtccagcagcggcggatccggcctccctgtggcctggcggcggtggatctgtcctgctattgtacctgctctaaagagtagcaaatggcattgtgtttgcgttgttgcacatagatcataggagtaactgctagcttcgatcttacaataaaagcagagcaaccaaaggttctaaagaagctagctagagagattctgcagcaacgaagaccaaaccaacatatgtttcatgtccagttcgaccgtagttaggcatgcatggcattggtaaatgcagatatctcgccttcacgtcctaatagtgctcatgtccatttgctcctcatgcatagggcatgaaatacagtcaattttaagcagtccgccaggcagtttcgtgggggcatgagagatcctggatccaaatgtagaggtcgacggaagtttgttgctgccccttctgcccctgcctctccctcccaaggtgatacaaggctgcagctcaagcctccgacggcaagcacatttgctactacactcgcattcctcctccttcaatttggcctgaggccatgagccatggctgcaaataggagatgtattggacattacatggcaagatggaggagggctcgaggtgccaaatagccaagtggtgggtgactacacgacaggcacaaccacattctccaccgatgcgccaagggtttctgccatcactttggcttgttttgctgccatatatagcttgattctggtgttctaagtccatcctgtgccgccaccagtgaaaatcgacttgtagtgacgtcctttttctcctagcttactatttaacacaacgaaatgaaaatgtaaaaaaggtggcaggtgacgggagttgttgcaatactctatatctcaacaaaacaatgtgaagttttggtagtatcgaagtgtcccccaattgttatggtatatttccaaaaactcatgttaccctaaattttacattaaaaatctcacatccaatgtcgtcacactattgtacatgccctgtggaacaagttattagcagctgccactcatgcatgtacatgcccgactatataccccaagttggttttaaaaggcaagctccaaaacaaagatcaaacaacacaagcaaaagagctgtgagctacagaaggtagagcagagggactagtcatgaaggtcgtaacttcttgagccacatgagtagtgagtacctagtagcggccaccgtgtcatccattacatttatcgtgggcatggaaggaagcaggaacaagtagccctcccttcttcacgttttgacgataatcttggtcgctcccattcatcagctgcaattggatcgactcacaatatacagatggagggagggagcagcgtgcagcagatcaatacaagacagacagtactgaaccggcgcagtgctctgggctagcttggcagtttgttctgtgctgtgcacgcccgtgatttctgccacgatcaaaactgagaggaaatccaggataggaaaagaacaagacaagaccaagagtttcttgtgccatcatagttgtactgggaataattggcatgcttatagagcacaggtcaataatatagctatatctctttgctccaatatctacatgtcaatattatatcacatcaatcaaacaattaaacacacatgtacactttaatgtttatgatcaaaagtcaattctatattcgaggccttgtgacatataagtctgtctatctcagaaaatacatagaaaagaaaatcatcgaacatcacatatagtgcaccaaaggaaaagaaaagggggttgaaattgcaccaaaataaaatccatctaatatcagttttacgtaaacacctaatatgcatatacatcaagatcaagacaggacgaaggagcagagaggaaaacgagatccccaaatccacccatacccatacagcacaagtatgggccattatcctactccctccgtttcatattttaagtcattttgattttggttaaagttaaactacttcaaatttaactaagtttgtaaataaatatagtaatatttacaacaccaaattattatcattaaatctacagttgaatatatattcaaaatatatttgttttgggttaaaaatgttcctactttttttctacaaacttgatcgaacttaaagtagtttgactctgatcaaagtcaaaagtagttgtttacttgcatcaatctaaagaatgaacttccgaaatacaaattgattccgcgacagtggctcttccgtgggcaggtggagatacgggccactgccgtgtttcctcgcactggcactcagggatttgggtggggcaaagcagacggcacaggaacaagctgcaatcacaatctgatgacctgtagggcagtggtttttactcgcaagcaggcggagagattggatgcgtgaaagaacagcgtgtggattgcaggcagggccagcatcgcgagctgtggaaatcatcgcatcgatctggtggagcggacgagaaagcgcttgggatccgatagagtagtcatgtggcctacaaaaatcatttttttatcacccgtactagctgtagcgcgtgagaactcatgctagcacccggtgccagatttatagctctcacttccttctctcttctcttctctccctttaacctaagaatagcatgacatgaaaaattttgggaatttcttgtataaataatacaactttaatgaaaaactataaaaaaatagatattggttatccgaaattataaattgagcaccaattgttcgataggataccagtcaaacaatggttattcgacatgattggcacagtaaaaataaattggaaacttaggatgtgtgtgcatgcatcagagatagagtatcccaaatgagaatgatgggaacagtacactaatattcatacgttaaatttgtcttttttatatctttatgtgtgagttgagtttggacttgatattttgtggagttgtatagatatgttgtatgattgttgttagttttttcataattgtttagatagtttttaagcaaacgagaggacatccctcaagggatcaaaatactgtcccgtagtatatcatatgaaataggcgattgcttcctgaacacagggtttccactcctcatgcagctaattaatgagaggaggagggcataccaaaacccaaagctccatggctatatatagctaggaatcacatcatgtccaattaatctcgttctcctactgcaaaatgcaaagaagagtactccagtaccgtatcatgttcaattgtaggcatacgaggcatccggaactcagatatctcatcttgatgtgaaactcctgtgatctccagcttgtgggagacactgtgacagagtgggtctttcttactgatgagatggacatctggaatgcttgatggtgtctttccatagcgagcatagcttggcctccaacacgtttgtttctttgaagtatctcaatcaaaattagtcagaggagatgagtgctagaccgatgcaatctcagctcttcttgttttctatatgaattgatctgaccaactaatcaaggaaaaggcatttgcatcttaaaggaaacaagtgtgtttggtgtgaaaagattcatgcgatagacaataaaaattgccaacaaataaactatcactaaggaactcatcgaatcaacgagtacttaaggaccaaagtattggatgatgcaaatattgataaggagtagcaagtgacactgtgtttgtgttattgcacgtagataataggagtaactgctagatacaatcttaacataaaaaccgagcaaccaaaagttctaaaagaagctatctagagagactctattcagcaatggagaccaaaccaaaacatgtttcgtgtctgtttcatgaccagttcaaccgtagttgggcatgggtggcattaggaatgcagttatcttgtcttcttgtcctaatagtgctcgtgttcctcacacagaaggcatggacaaccatggattttaagcagtccagcaggcaatggcatggcggcacgagagatcgctgatccaaatgtataggtcgacatgagcttgttgcaggttagccacgcaacactggtgcatgcaagcaccgtgctacattacagccctcatttttcatatctttggataggaggacacattgatacggctgatatggattggctgctaaatgtatgatctcgtcaatatctgatagaaatttggatccatttttcttgacaggtcgagcgagtaaaaaggacaaatttgttatatgacattggggagcattcggagagtcttcgatatgtgtccacgatctgttttgccttgatccattcgagtccaatacgtagtgcaacaataacgtatttttctcctactagattattctctttgttttttaatatatgacgttgttgattttttaagatatgtttaaccattcgttttattaaaaaatatgtaattattatttattttattttgacttgatttatcatcaatgttattttagtaagatttaaatattttaatgtttgcaaaaaaatttcggttgatattaatataagtgatctaccagagtgctgaacatggtcatgcatgttcgattggataagattatggcttgttcagattgataccatttcaaatcatatataccattttggaagagttgtcaaatatgtgcatctatttagtttcttgacaaacttttagtaaatacataaaaaattcctgtcaaaattttggcaatattgccaaatttccaaaatttggtaagttttattttggctacaatgtgaaaagcccctatatctaaaagtgtggaacatcgacgaactctgtttctatggtagcaaacaaacaaaaacatattgtaaaacgcaaggagacatgagtggggtgacatatagatcagaatcctccatgtgtaagccaaactcgccagatagctggaggctacaaagcacacgatccatcatgatcagcatatatacttcttcagaggaaagggggaataaactaggtccattctgtgagtgtagtttgtatattctacagacaattttgcacacaaccctatatcgtacgatgagataggggaagttgacattgcattcctgaacacagggttacctctcctcatgtagctaaatagtgagaagaggaggggcataccgaaacccaaacctccgtggctatatatagctagggatcaaatcatgtccaattaatctctctctcctactgccaaatgtaaagaagagttccactaccatatcatgttcaattgttgcatgggcatgtgaggcatcaggaactcagatacctcatcctgatgaaaagcttgtgtggtcttcattttgtgggtgacataatggattgatcttactcatgagattcacattgatggcgctcgactgtatctccacagcgagcatagtttggccaagcatgtttgtatctttcattcacaataaaataacttagcagatcgttactccctgacagagagcataacgagaaagttgaggaatgttgtttcttcgaagtatgttcaaaattagtcagaggagatgagtgctagacttatacaatcccatttctgttttatgaattaatcaactataatcctaggccatttgagaagatggaactgatcagggccactcgatattcaaagttaacgagtgagtttggtgtaaaaagatatgtgtgatagacaataaattgccaacagataaatgatcactaagatactaccctaatcaataacgagtactactcaaggaccttaacaaagagtagcaaatggcattgtgtttgcgttattgcacgtagatcataggagtaactgctatagcttcgatcttacaataaaaatagagcaaccaaaggttctaaagaagataacttgagagattctgcagcaaagaagacaaaaccaacacatctttcatgtctagttccaccttaattagctaggcatgtgtggcattgggaatgcagttatctcgcgttcacgtactaacagtgctcatgtccatttgctcctcacggattgggcatgggaaacaatcaatatttagcagtccaccgagcagtgtcgagacattgcagattgaaatgtagaggtcgacgtagttcgttgctgccccttctgcccctgcctctccctcccaagagcatacaagcctccgacggcaagcacatttcctgctacacccgcattcctcccccttcaatttggcctgaggccataagccatggttgcaaatagatgtattggacattacatcgcaagatggaggagaacccatggtgccaaatagccaagcggtggatgactacacaacaggcacagccgcattctccaccgatgtgccaagggtttccgccgtcactttggcttgtttcgctgccatatatagcttgatttgcggtgttctaagtccatcctgcgtcgccaccagtgaaaatcgccttgtagtgacgtctttttctcctaccttactgtttaacacaatgagatgaaaatgtaaaaaaggtggcaggtgacaggaattgttgcaatactctatatctcaacagaacaatgtgaagttttggtagtattgagtcttccccaaatgttatggtatatttccaaaatctcatgtcaccctaaattttacatgaaaaatctcacatccaacgttgtcacactattgttcatgccctgtggaacaagttattagcagctgccactctgcatgtacatgcccgactaataccccaagttggtttttaaaaggccagctgcaaaacaaagatcaaacaccacaagcaaaagagctgtgagctacagaaggtagagcagagggaagctacagaaagtagagcagagggactagtcatcaaggtcgtaacttcctaaaccacatgagtagggagtacctacacacgtcgctagtagcggccaccgtgtcttccactacatttatcgtgggcatggaaggaagtaggaacgaggagccctcccttcttcacattttgacgacaatcttgatcgcgcccattcatcagctgcaattggatcgacgcacaatatacagatggagggagggagcaccgtgcaacagatcaatacaagatgggcattactgaacaggcgcggtgctctgggctagcttggccatttcttctccttctagtattctttggtttcaaaatcacaatcatatgttgactccatatcctttttccttcgcttacggttattctccttgttgaggtccacatttctcttctgctttttgtgaccctcaccatccttttatgtgcacttactgtcggggtgatccatctgtccagtcctcctcctgccatggtgatacagttccttacatgtacttacacaaatacaataaaaatctggggctgaaataaactttattgcaaccgtatgcactttcataatgttccatatccatttgtacgaaagatacagcacatatgcacatatatttaacaggaattatataacaacggtgaaaagaggaggaaaaaatctaggagcatggtgaaaagtcttgttggcagtaggaggatgacacaaaagaatcaccatggcaataagtgtgcagaaaaggatgatcagagttttgggatgagggaggagaaggctgaggatggtagagagagtgctgactataagcagaagagggtgatggacatcaacagggtcacggacaagaattgcaagagtaggaagaaagatttagaatcagaatataggtttgattgtgaggatgaagaggtgacatttaacgtatataacattgacatggagatattggagctaatcataacacactcagatgtgagcatattttgattcttctatgttagcatcagtttgtagttagaagtttatgtttccttttcttctcgtgccgtcatagttgtactgggaattggcacgcttaactagagcaaatgttaatagtatagctatgtgttatcactagctccaatatttccatgtcaatgttatgtcacatcaatcaaacaactaaacacacatgtacgctttaatgtttatgatccaaagtgaattctattttcatgaccttgtgacatacccctttgtcccaaaaaaaaaaagaccaatcctagctataaacctggacacacaagtgtccagattcatagatagaattgggtttttttatagacagagtagtatgcatgtataagtctgtctatctcagaaaatacatagaaaggaaaatcatcgaacatcagatagtgcaccaaaggggaaaaaaagaggtgaaattgcaccgaaataaaatccatctaataccatttttacgtaaacacttaatatgcatacatcaagatcaagacaggacgaaggagcatagaggaaaacgaaatccccaaatccacccatacccatacagcacaagtatggatgattatcctactccttccgtttcagattttaagttgttttgattttggttaaagttaaactattaaactaagtttgtaaataaatatagtaatatttacaacaaagaattaatatcattaattaaatctatagttgaatatatattcataatatatttgttttagtttaaaaatgttactactttaatttttctataaagttggtcgagcttaaagcattgcctctgatcaaagtcaaaagtagttgtttacttgcttcaatctaaagaatgaacttctgaaatacaaattgattctgcgacagtggttcttttgtgggtagacgaagatatggcgctacagcggtgtttcctcgcgctggcacttggggatttgggcggggcaaagcagacggcacaggaacaagctacaatcacgatctgatgacctgtagggcagtggtttttactcgcaagtaggcggagagattggatgcgtgaaacaagagcgtgtcgattgcaggcaaggccagcatcgcgagctgtggaaatcatcgcatcgatctgatggagtggacgagaaagcggtagggtctgatagtagtcgtgaggcctacaaaaagcgttcttttatcgccggtactagctaccgcgcgtgagaaacttgtgctagcgcccagtgccagatttaaagctctcacttccttctctcttatattctctccctttaacctaagaatagcatgacatgaaaatttttgggaattccttttaaaaataatacaactttaatgaaaaaaatataaaaatagatattggttatctgaaattgtaaatttagcaccaattgttcgataggataccaatcaaacaacggttgtttgacatgattgatgtggtaaaaataaattggaaacttggggcatgtgtggatgcatcagagatagagtatcccacacgagaaggaacccatgtgagtggattctgatacctcgaaagcatatccctcgtgtatatttttcttttaaattcgatataaatagttgtaaaaaaatctgaaaaaaattggcaatgtggagtatagtgatatctattggtccaccaaaaaacatcgagaaaaaaaagacaaattcagatgtaaacagtacactactattcatacgttaaatctcaacgtgtgagttgagtttggacttgagatttgtgaagttgtatagatatgttgtatgattgttgttggttttttcgtagttttttataattgtttagatggtttttaagcaaacgagaggacatcccctcaaggtatcaaaatactttcccatagtatatcatatgaaataggtgattccttcctgaacacagggtttcctctcctcatgcagctaattaatgagaggaggagggcataccaaaacccagagctctatggctatatatagctaggaatcacatcatgcccaattaatctcgttctgctactgcaaaatgcaaagaagagttccagtaccgtatcatgttcaattgtggcatagtcatgacatgcatccggaactcacatatctcattttgatgtgaaactcctgtgatcttcattttgtgggtgacataatgggtctttcttaatgatgagatcgacatctggaatgcttgttggtgtctttccacagcgagcatagcttggcctccaacacgtttgtttctttgaagtatctcaaacaaaattagtcaggagatgagtgctagactgatgcaatctcattttctgtttgtttcctatatgaattgatcaactaatcaaggaaaaggcctttgcatcttaaaggaaacaattgtgtttggtgtaaaaagattcgtgcggtagacaataaattgccaacaaataaactatcactaaggaacccgtcgaatcaacgagtacttaagtaccaaagtattggaccatgcaaacattattaaggagtagcaagtgacactgtgtttgtgttattgcacgcagatcatagaagtaactgctagctgcaatcttacatataaacggagcaaccaaaagttctaaaagaagctatctagagagactctattcagcaacgaagaccaaaccaacacatgtttcatgtttgtttcacgtccaattcgaccgtagctgggcatgggcggcattaggaatgcagttatatatcttgtattctcgttccaattgtgctcatgttcttcatttactcctcacacgcaggcagtggcatggcggtacgagagatcgccgatccaaatgtagaggtcaacataagcttgttgctgattagtcacacaacactgttgcatgcaggcacggtgctgcactacagccctcatttttttgttactttggataggaggacggctggtatggtgctggaaatttggatccgtttttcttgacagtcagacagagcgagtaaaaaggacgcctcttttccgttcaaatttgttatatgagactggggagctttcggagagtagtcgatgtccacgatctgttttgccttgatccattcgagtccagtagtgcttgccttgatccattcgagtccagtagtgcaacaataatgcaattttctcctacttttactccctctgttttattttttgagacgtttcaccattcatttttttttaaaaaaaatatataattataatttattttattgtgacttgattttatcatcaatgttctttaaaaatgatttaaatatttttatatttgcacaaaaaatttgaataagaaaaataatcaaacgttggtaaaaaaaataaatagcatcatatattaaaaataagtagtatttgacacaaatagaaataaaattgtaaaaatggtgacaggtgacaggagtgtaatactttatatctaaacagagctttgtgagcttttggcggtactgaagtgtaccctaaattttgtgctatatttctaaaatctgcacgtcaccctaaatcctacactaaaaatctccatgtcataccattgtacatgcccataggtacgtggaacaagttattagcaggtttcttttaatgaacaagttactagcagttgccactcatacgtgcacatgcccaactaatagattaataattagtccctatcatatcggatgtttggatattaattataaatattaaacgtagactattaataaaacgcatccatgatcttggactaattcgcgagacgaatctattgagactaactaatccatgattagtcgatgtgatgctacagtaaacattctctaattatggattaattaggcttaaaaaattatctcgtgaattagctttcatttatgtaattagttttgtaagtagtctatatttaatactttaaattagtgtctaaagatagggactaaagttaagtctctggatccaaacaccaccttaattccctggttatattagtgaaagatcagcccaagttggttttaaaaggccagttgcaaaacacaccgatcaaacagcacaagcaaaagagttgtacgtgactgtgagcaacacaagatagagcagtcaagatcctaagcccatcagagcgcacctagacctactagtacgtactggccaccgtgtcgcgcttccactacgtacatattcgcttcgacatcattgggcatggaaggaaccaggaacgaggagccctcgttgtctcacctgtacacgacaaccttctacaagatgggcatttcgggatgggtgcagtgctcttggctaacctttcagatttgcacggtgctgctgtgtacgtgttcatcagtgcacgccgtgaattcttctttctcaattacgggaaatttcaggacgcttcttatttcttctttatttccttttgtttggcgttggttaattagtgttggttgaataaactcgtgtgccttggcttagatattttttctttcttgttcatttcgattccatctacatgcacgagctcaaggatatgtgcggatgtcgtgcgtgttagtttcgtttgagggcatccaaggctaccttaaggctgcctgcgtctgaacccaccatgatcgagacaaacggcgtgcgctgtggggatggacgcggcatctggcgcagtgtgagaattgttctaggatattattttcggttgtaagcatccgcctttaaatagcaagataaacagaaaccacatcagctcgattacgtagcacaaattttttcttcgtttttgtcggatcatatacagttcgcgcgtgtagtgttcgttcaaaaaatttctggcctcactattgaagaattcgcacctaactccttcggtgaagggaatgcctgaaagaaatatcaccaaagttttcttccagcagatgttattttcgtgaaagaaaaagaaaggaatgtgggtcatgaaaaactaatagattgtcacactggccagccagctaggctttcttgattaaaacatactgctagttcggtgttactctcagtgagaattttaaggtggtgtttgggaaggatggagtcactctcacaaaagtataagtctctatgatagggacttatacttttatgagtttagtccctccttcccaaacaccacctaatatgtatggtatactttagacttcaagagttaagtagcagaacaaacttatctcatttagtttctcgacttactttctcatatcatcaattaatcacaacaatttctcatttaatttcacatcttttcttaatctccgtaaaaactctaatttaagtgtttatatgttgggacggatgaactattcattataaatatatttactaagcaactccctgagtccataagagtattagtcaatttacttttgggcacatgcaatgtagagaaacaagaaagtgtaaaaatggagataaccttataatgcgtataaaaccaagccgttattgtaatagttgactctaatatatattatctttgctggatgatatagatgtggccatcttcaacgtcgagcttaattataaaaaacactcattaagaaaatattttttttctcctaggatagccaagaggcttcatgtctgaagataaccttacatttaactagtagttcatcttagcatttaatttaatttgctcgagattgaacatagttgtgaaacaaagtgtggttttcatctttttgtgttggaaaatttttaaggaaattgaaaacattgtgatggtttttgtgagaaatttagtttgaaaagttggcgattgaaccaagcagcaacatggcgtgcgatggttggcacgaacagcgtcaacccggatcgccgggcccacaattggaacacaagcggaggagctcgctgcttcatacggctggcaggtggggccagccaacgagcacacgggagaagcggagtccaggcgtgatgtggctattgccaattgggtcgcacaacgtgacactcgttcagaatcgtttagaaaaatcgtttacgtagtgatgacttgttagcgtttcattcactgacagaatacatgcacactctagggctgtgtttagttcacgtcaaacttggaagtttggttgaaattggaacgatgttacggaaaagttgaaagtctatgtgtataggaaagttttgatgtgacaaaaaagttgaaaatttgaataaaaactttgtggatctaaacacggcctagagagaattgagctaggagaatcaagcattttcagctggcactaataattggtagtgaattgaacgtaccttaagaaggaaccaaaggtcaaaaagcaaccagttgaggctcaggccgctcaggctatgaacttgaggagttactacagcaaacgagcatggtggatataaataccgagagttgggacttttaaaagcatccatcgatccaatgaccagtagtagtgagcgcgcttgcaaattcagtccgtgtcgtgtgcatcaacatcgtgcacatgcacataggaataggatcgggaggtatcaagagtttggagcttggggaaagaatgtgactatgtgttggtagctgttagcatcagtagctgttagattggtgatgtcttgagtttggctgagtctgtatgtcttttaaacctttgtcatttgcactgaatgggctaatgcttggttgttgccttactgggccgccatgttgggctagcggttgcctggttggtagcgacagggtatttagtcagctgtagtcacctggttggcgattatgatgagaaatgaggaaaaatatgaaaccaatctctccctctctctctctatatctgtttcaaactctccctgttcttcctctgaatccccaatccccccttcattcttgagtaactcctgtcacaaattcgagtgtgaggcaacactgacgttcgagtttgtgacagtagcctacataattggtgtacctgtttaaacactatggtaacccacatcattggtgtacgtgtataagacgaggctagctctctcaaagagagaaaacgcatccatgtcataacctgcaattccatggaattaaaagattgatgacccttgatacttcagagtgcacatgtaacgaaagaaaggtaaagaagagagaacaagatgtttagatgatatttatatgggttaatctagatcatccatgccactataaacctatatgtttagaaaaatatcacttacaatctatctaattcgaacgatactattataaacttattgcaattgaagatatgccattatttacctcttcagtgcactaaaattattttctggaccaaattaccccttatcatctaccagcactcagcggatgaggtgaagcctttatgttgcgatgagttatcttcaatccgataggtcggcattcgttagggcaacaatgtgaaatcccaaacagcaaaacaaaattcaaagctaacgcctttacctcggtggaatccattggtcggccagatttgccacgcggtagcgcacgctcgtcggtgttgatgcaaaaaacacatactggcctgggagatctgcttagttctagtgcaggtccaaaggttgatgagatacgggcgtgccagtcagtttgaccctgcaactgacaagatatgcaaatagtagatcaatgagccaatcggcggacaagctgatggagtagttccagccgatgccgataccagccaacattgatagggttttgagctatcggctatatatccaatgtagaatctgacacttgatgtaataactatataaaggcggtcggctgatgatgaaatataacaataatataatccagtagaaactaatcggctaacaatatgatatgatagaacaagtactgatccgatggttaaagcatacatcggctggaggtccgatgtcataaaatacataagattagataaaccaatgaaacctttgttgtcatcggctaaatccaacttatatgtatatgcaatccttataagcccatgcaacgtccagataacttatcgtctagcaccctaataaaacactagcatgaacctattggcttaacaagatttatattatcaacaacaatctagtaggtcgaacctaaccaatgcagcacgagattgtatatgataatctaatactcgataagccgatagatctgcctaatgtgatggatataacaaatctatttacaacagtattgtgattgtagagatatatcgattaagatagaagataagacctaaccgagacagttccaactaaaccgatgcgtctctaaacacaatgcaattagagatagaattgagatatcaggtacgcaaatatatcaaccaaactagagcgatccaagagatcgaagcgatgcagccttgaacatcaacgtagccaatagattcaccagggccggtggaatgtaggacttaccccttcgccggagatcgaactgaaccgatgcagccccgcgtcaggtgtcaaattccgccagctgataagtaaaaacctcgggaaagagggtggcgatgcgccgtgagtaatattgatcgagagattgtttacaatgactccgggtgtacatatttatactcatagggagatactagtccttgtaggacaagaaagaaactttcttaaaaataaaaggaaaacataaagtccttataggacactaaacacattttcctaaaaataaaaagaaactaacaaactattcctaattaatagataacttgtcatgccgcatcctccttaaactcggactcttctagataagcttcctttaattgatccgactccatcaaaaacacaattgttggcgactcatatcggctgattccagtactctaaagccgatactgactttaacccgatagtgacttcgggcttactaaattttggcgttaacagtcgggctgcttctgctccgctcccgccaccgccgatctagtcgacgggcgcgcgcagccgctatcgccggtctcgtcaactgtaattttaccgggagagagtggaggggactgaggtagaagataatgggtaatttggttaaaagggaattttcaatagtggcatatttctaattccaacaaatttatagtggtaatgagttgtaatggtatttttcaaaaccagcaaatttataatggcatgaatccaattaatcttatttatatagctcgtgaaatgtttttacttaatatgacactccctccacctctaaccttttcagaccgaaacatgatgccatctatcgttagcatgtcgtcgttccatgatcaaagaacacccgcgttgtcatatgtacagcaagtcagaacacatgtgcactcctccagagagagttgagttaggacatataggagagtccggggttttcagctggcacttgtgaggtactgaattgaacgggagatcgaccataaaaaggaagcgacggccttaataattaaaaacaaccaaataggatcgggaggtatcaggagtttcgagctgaccacaaacatggctctgtgcttgccgacgcggacgacgtgcgcgcgaacaccaacacgccgcgctgattctctcgggttggccacggatgctacgcagaggctgggtggaagtggatgatccattccagcatccacaaggccacagctgaaccggaggcatccgaaatattattattggacgttgcggggatgcactgcacaagtgcgtacaaactcccaagccagcaaagccaacaactcggacaattcttaccataccaaggagggatgagagcctgagatcgacagatattctcgtaaattttgtcacaatatggtttctatataatttgcattgaacggctgcatctcactcttgttcttttttcttttgcccactctggatccaccacatctctcaaaaaaatttatatatatttggaagcataataactggagacgccttcggctcgggcgcccgatatgaggggattaaaattggccgctgatgtcagcgcccgatttacatgcaaaactagtttaaactgatttttctcttaaattacttatccaaatcatgatccgattacaccattaaattcgttgcaattaaatcttcaaaacaagaccacacttggatatattccaacgaaaaaaattagcttattattgatttttttaaaaaaatgttgcacgatgtttcaccaggtatatcggaattgtcacactaagtagatcgaaaatgtttcactcgtttaaatcaggtgttgtttcaccttatataaaaacaatgtttcagcaaatagcgaaagaatgtttcagttcactgcaacattagatctatacatagtgaaacattgtgactacactaggtgaaacatttttcaatggaacaaaaaataaaccaaattcccttaatagggggcttccaaaatatgtgggttttttgttgcaatgtaatatttcgttcactgcaacattagatctatacatagtgaaacattgtgagtacactaagtgaaacatttttgatggaacaaaaaataaactaaatttccttaatagagagtttccaaaatatgtgattttttgttgcaaaagagtattttaattcattgcaacattagatctataaatagtgaaatattgtaaatacactagatgaaacatcttttgtgaaaaaagggaggaagaagtgggtgggaccacgtgggggaggggcgcgcagggggagcgcccgatccggctccccccgcgccggtcgcccggggcgaatcattttcgataataactaacttgaaaccatgtttcaatacaccatactgagagaatatcgaaaatgacttgagtatccgaaaatataagggagtttggacggataaaacattttatagaacaatgaatctgaattaaaagtatatgctaattcattatcctatgaagtgtctcatccatctaaaatcctttatattttgggacggaaggagtacaataataaattagttacatgtgtcataaattagttacctggcagataaatttgaacttttcatcaagatgattaggaaacaaaaacactcaattgtgacttcatggcaaaagtttgggctgaaatcgacaccgggtagtaacttgaaatgcatgaggattgaacttggtttttctctctctaatttgggtattcgatttcaaacttctaaataaaatttgttttgctagtccaagttcctatatacttgggctcgttgaaacacaggtttgaaaaaaaaaatacaggaacaagaaaaaaaactgaggattttttttttcatgcgttcacggcctctttaattcatagattcataggattcaaattcctatggattttttttctacatgtccctttgatttataggaaagaaagggaactttccataggattgtattcctatgcttcacatttcataggaaaaatagcaagaggtgtcacctctttgtgaactttctttgcttttcccatagcactatcaaaggactcctattgtctttcctgtgtttgttgattcctgtaggatttgagaaacctactacttcaattcctgtgtttttcctatttctgtgtttttcctatcctgcgaatcaaaggggccctgaaactaaatgcaaagtttcatgcgtttctcccttagaatcaacaatgaaggaatatttcctaccgttttcctgcgatcaattcctgtgaatcaaaggctgctataggcctacagtgaatgaatctataggaactcgaatcctccattttttttctttgtttttcttcatttcaaaggggccctaaaacaatgatattttcttgggctgaagcccatgagcatggccagcacacagattaatggaaatagtacatcgaggtctctcatcttacactgaattacaaaataccgaaaaatcagatatatggaatccctcaacttataaaaccaagtcactcaatttggatccttagatgatactgtccccggttttatccgacatggcagttgagtcaacgtgggaaccacgtggactccacatgtcaaggtgaccacgtcatcaccttctctctttctcctcttctctctcttcctcgtctatctaacttttcttgtcgtcatctaggtgggccggccggcgatgggcgacacggcgacgctgggcggggagaagcggcgggtgcggaggaggttgcggggcgaggcggaagaggaggtggcccacggcaaagacgctgtgaagaagggtggcagcgaagaggagatgggcggcatcacttgcggaagagtcaagaagcttgagagtaggggcggagccaggtgtggggcagcttgggcccgggccccacacttggcagaaaaaataccaaggaatttactaatttttctattaaaattcattcaagaagttcatactctagtgattaagccctactcttgacataatcctggctccgcccctgcttgggagagaaatggggaagggcaaggtgcatccctcgctgtcaccgacggtgctggtgggtggtggcgatggcggtactcagggcggaggtgaaggaggtgctcatgttgatgtggttgtcgtcatcgtcgatgacgaggtgggggaggcggacaaggaaaagggaaagggtggagggagtggaaagagcagtggccaatgcgagcgcgtgtggagagggaggaaatgacgaggccggtggtgaatgcgcgagaagagggaggaggcgaggaggccgacggcgagcgcgcaaggagagggaggaggcgagggcggcgagaggggttgggaggccagtgagcttgcccactcccctggggcgagctgcttcctgtcggcggtgaggagctttcggtgggtgaccccctcccctgggccggtgttggcttggcgagcagtacgctcgggacgcggccgttccaacgctcccgcgctgctgcacgagggccggctgtctccctcctctacccttcctccctgcctgacggaagaaagagatgaagaaagagagaaaataaagaagtggatctatgtgccacacaacgtaaaaccactttcgaattggttcaggggctaaagtattcgctttaatagttaaggatacctggttttatagctggaggatgaaaactaagaccaaaagcaatattttttggaggaggtaaagtagacttacccttttcttttcttatactagtattttttcttgcctatttgtaaaaggaataagttcaccggaggtccctcaacttaacagcgagatttttttgaggtcccttaaccacaaaaccagaaatgtgtacccctaaactcacacaaaccgttcaaaggaggtcccatggcagtatatgtgggtggtttcgctgacgtagcatcctagttagcaaaaaaaattttaaaagtatgtggggcccacatgtcaatagcactttttttttctttgcttttcttctcctcttctctttctcttcttcttcactgagtgaggccggcggtccactagcaagcaatcttggtggtcgtcgcgcgctagctcgtcacacagatggagcaagagcaagtgctaacccaggagagcaatagttgcacctgcagcagcagcagcaacgacgcgagctcggccgcctgcagctcgctcaacgcgtcgtcgccgagctccatggactccgggagcgccgttgccgccggcagcggcaagaagcggccgcgtagacgctggcggcggagagggcggagcagcgatgggcgggcagcgaagcgagcgcggcggcgggtccgcgcggcagccgagcggcagcaggcgagcgcggcctgcgagcgagcggacgagcacggcggcgggcggagcgaacgagcacgacggtgggcgagcggacgagcacggcggggagagcgtgtaggacttgtcgacggagagcgtgtaggactcgtcgacggcggggctgagcgggacgtcggggtcggagacggagagcgcgatgatgcggacggggacgcggagagggtgtagttggcagggggaaccagcggtgcgtggcgcttggcgcggatgaggatggctcggctgacgacgaggacgatgatggctcggctggcggtgtaggcccgcggagctcgcccaccgccgccacgctcctccttcggccacctccgccgttacggccccctcctccgcccgccgtccgctctgctcggccatgtgaacaagaccaccgcgacgagcagccgcctcaacgacgcggccggcggcgcaaccacagaggacgacgaggcggacacggaggaccacggtggccacgcgcggccgccgccgctctcccctgccgcccttgcctgcctcgccggccgcccctgcctgcttagcccgccgctgccgccgctctcgcccaccgccaccgcgttcgcctaccaccaccgcgcctgccttcttcgcctgccgccgccgccgccgcggccgctctcgccagccgtcgccccgcgcgtctcggcccatcgaagaagacgagagaagagaagaaaggggaagaaacaagggatgtgggcccatatcgttttctctcttacatgtgggccccacgtactttatttatttatttttgcttactaggatgccacgtcagcgaaaccacccacatatactgccataggatcttgtgtgcacggtttatgtaagtttaggggtacacatttctgattatgtggttaatgggtctcaaaaaatcttgctgttaaattgagggtgctccggtgaacttattggtttataaaatagttgagttttttttgtaaaagggccaagtaaaaatttcactcgatgggcctcccacgaccgcgcacgtgggctgcttgacccattcgcgcgcgcgcgctagtgctcgcgtagtgactagtcctactactcctgctacccatgtgctcgctctcctaacaccaaccagatccacgaacgccacacgaaacgcctcgcgtcgccgaccgccgccgccgctcgctcccaagctgccaacgccgccgccgctcccagctacctacctcccgcgcgccgatcgcctccgccgccgtagacctccctccctccttccctcgctgcttccgcctcgatcccgacctctcccgccgccgacgccgccgcctcgcattctccctcgccgccgactccgcctaggcggctagctaggcctcgtggccgcgcggcggcgatcgccgctgttagctaactatcccccatcccctcctagctagggcgagcgagggaggtccggggcggcttggatcacgcccgggtggagccgccccgcccccctaccccacgtcctgggcggcgttgacctttcatccgatcccgcggccgaaatggtaagtcgattttgtgctcggtcggtttcgcctactgtttccgcggtgacttgagtagtggcgtgcttgggggatttgggtgctggaaatgcaagcttagtaagggggtggtctcgcgggttctcgtagcggaagctcttgtagttcagtagttgtagttgttgcgcagttcaattgggctcaatgcgtgttctgattgggcaccggttgtgctgacgaaaccggtgggaaacgttaggtaggatctctgcaagataaactgattggaatagtcgcgcattgttaggagggttctccattcttgctgtgatggtacaatgtggagaggttcgagctaaattaggggagtaagagcgtgatgagcgaaatcttggtgtgctggacatcttaaggacttggaaatgttagtgcaatggttgaagctttatttatatgcttcttgtgagggtactatgctgagttaatgggctataaattggatgtttgtgggataaatgagcactattgcttcgtttgttgttcttttgaaaataaatgagcttggtattgataggtcgcagctgggggtcatgggtacaattacatttattggacatgttttcttgcggactctgttgagaagttgaggctaatggaacgtgatatagatcttacgtgtgtgctagtatctcttgataaccaggagctttataatctcttttgcaatccatttcttgaagagttaatttgttatgcaaaatgggcactcaaaatttgggatacaggctaacagcactttctgcaatattttctatatcagttcacatttattttgtggtgactagtgcatgaagttgggtaaatactaattaaaaaatcttgatgttgtacttgcaagtcatagcatggcagaagcgctgaactagcgagagatattttgtcagtaacttctgagattttgttactgtatttttttttcactcggttttgttcaactcagattaccatgtcattagttcagcaccattagccttattcatgcaccaatgaatattctgttgcaggcatccaaagtccgctttactgtgggttctaatgtttgggttgaggatgctgatgtggcttggattgatgggctggtggagcaggtcactggggatgaactaattataaggtgcacttctgggaagaaggttggttgttagatgcacaataacatacattgcccacccaaagtggcattttgagaatgcatgtagtccaaagatgctgcatcattttcattcatgctttatcaaggctattgcactatttcccccctatatgatttttgtaccaggttgattagtttaagcttgtctgtgaatttgttgtgcatttagtggttaattgtattgaagattcatagctaaaatagtaataaattgatgcatgcaatggcatgctttatatttctgttacaggttactgcaaatgtatcaagtgtctatcccaaggacgcagaagcaaagcgctgtggtgtcgaggatatgacgagactagcttatctacacgaaccaggagttctccataacctaaagtctagatatgggatgaatgagatatatgtaagataaattgtgcaacacattaactcttccttgtgccatttagttaattcatcattatagcctctattttgtttgatcttactgatttgtaggttgtatttgcatcattcatacatgttctctagggtgtaggttgtcactggaattgttttaatcaattcaccccctgtataactcttatgcttcatacatgaatttgaaattttttacttgtgtttagtttctacattacatgaatatatcgtttgcaatgctcttcatgctttaacttgtttaatggattaaagtgctaattcgataacgtcttaactgctctaatgaattattgtcctcccagacatatacaggcaacatattaatagctgtgaatccatttcaaagacttcctcatctgtataacaatcatatgatggaaatttacaaaggagcaggatttggtgagctgagcccccatccctttgccattgcagaccgtgcatataggtttgttttcagcaaacaaaagtgcctttagtatgttttgcttgaattcatgtatgtatcttaaatttctactgtgcaggtatatgatgaattatggtgtcagccaagccatattagtgagtggtgaaagtggtgctggtaaaacagaaagcactaaaatgcttatgcaatatcttgcttttatgggtggcaaagttcaatcgggtggacggtcagtgcaacaacaagtgctggaggtgagaaatccattagcacttttacttcccacttattagttatgtttctcttatgcctctcaaatatcttaagagactgtcaaataatgtatatcagtatatgcatattatgagctatcatatgtgattacatcattacatgtaaatcaaacacttcattttacagggtttcatcatatttatattttcatatttgatattactaactcacttcacaatctaccggtttcattgacatagtccaatcccgttcttgaggcatttggaaatgcaaaaacagtcaggaataataattcaaggtgtgaacatcaataacacttctgttctatttttaccaattggtttttatggttagcatttgttcatttaacacaaattttctctttcttcttagctatatgtcttcacacatttcctttgtctcacaatgcagtcgctttggtaaatttgttgagattcaatttgatcagagtgggaaaatctcaggggctgccataaggacttatcttttggaaagatctcgtgtttgccaaatatctgatccagagagaaattatcattgcttttacatgctatgttctgcaccagcggaggtaaaaacatggcaattacagattaaactcttaaatatagggttgcaacttacattttagcagtatcttttgccaactttcttacaagccattagaaaggaagtttttatcatgtaaatatggttttcattcaattgtaaactttatcagttgaggggcaacataagcagccaacacaatgttattatatttctaaatataatacagtaggagtacatgtcttttcaacctttttaaggagtactttaaaacaggtgtaaacttgctatgtttgtatatgtaatatgtgctgtcacaaatgattacattatacatcagtgggaatccacattttggttgtcaagataccacattttcaaaattacaactgctgtaggaaacagtattcctattgatgttagctgcttcaaatgttgaacgacaagcatataacttgtaatactctgtgctgttgtctcttgttttctttagttgttctattaggccaatgttgtaagtaatgcacttttttatccatgaactgtactatctacaacttttgacctgtactcaaaatgctggtgttaggaacgtgaaaggtataagttaggagatcctgcatcatttcactatctcaaccagtctaattgcattaagcttgatgggatggatgactcttcagaatatattgcaactagaagagcaatggatatagtgggcatcagttctgatgaacaggtttggtttagtgcaaagttatattggaaactagtttggtttatcttaaagagcacttttattaggacctctgttgggatttcttgcaggacgcaatattcagagttgttgctgcaatccttcatttgggcaatgtagaatttgtggaaggaagtgaagcagattcttctgtacccaaagatgataaatccaagtttcatcttcggacagcttctgaacttttcatgtactagttattccatgggctcaatgcaaagtatttttggggacccttgcacagtatttttgggcactcttcacccttggtatgacatgcatgtggaaacgttctgcaggtgtgatgaggaggctcttgaggaatctttgtgtaagcgtgtaatagcaacacgtggtgaaagtatagtaaaaaatttagatgcccgggcagcagctcttagtagagatgcattggccagaattgtctactcacggttgtttgattggtaagttctgaactagtctagatggttattgccattctgctttatattataattacaaaatttgtattgcacagaaatataagtggcaactatatgttttcttcttttcaggcttgtaaataagatcaatacttcaatagggcaagatcctagttcaaagcttctgataggtgtgctggatatatatggttttgaaagtttcaagacaaacaggtgcttaactggtatgcttttgcatttagtctcgtgtttatcttcatgcaataggtgcatcgatcatgctgtttgttgagtttgactaggagaagagttttttttccctgtacgacatatctccacttaccttttttatcattcagttcgaaattatctgatcggtgcatttctatctgaaatagatttttaaattaattatgccttaccttttctttctttcttttattctctcttttctgagaaaatatattctataccactgagtttgttcaagtttaacgattcgccatcgacattgtctctttctataatataccggtgactttatcaattgttctacaatatgccattgggctggaccttcttttcaaaaataccgaaaatacccttagagacatacaagattaacaattgatttatctctttagaagtttcaaaaaaaaaatgaaaacttttgtatggcctccttacacaacatggaagtttgtatacaagtttcaagttttttatggtatatttcatttttggaaaaaaatgtatatgtagtatatgagaaagaatttgcttatacaagacataatagcacaaaaatatcttatatagtgcatcaaagatgatttatattaaaaaaataaagtcttttatatagcatataacagataaattatatttttcttaaaaaaatagaaatgtaaaaaacttgaaacttctatacaaatttctatgttgcataaggaggccacataaaagttttcataattttttgaaacttgtaatgatataaattaattgttaatcttgtttgtccataaggttattttgggtatttttgaaaacaagacccaactcaatggtgtatcgtagaacaattgataacaatgtcgatggcaaattgtagaactcgaacaagctcagtggtatagaatagattctgttttttttttttttttgggggggggggggtcgggggcgagtggtggttataagaaatgttgctctttgcaaagtagaaaagttggcttatttgaacaatagaaagtgctagtacggtgctttatttgtcactaaaataggtcattacagtatgcatgtagttgaactttggaaatttgatatttgttggatataaaagcatggtgattgatcacatgaaaatgatgtaaatagttgtcttggaaaatatggcctaatatatgtagtatattattgtaacaaaaaaacaaccatcttgtgttgaagagtatcaaaaagaaaagggaaagaaattgcatttaaggagagtacttttattcaaggggtaaaatgtacttttcgcatgggttaacggagatcaactaatggtgatggcaaaaagggaagaaatatacttgtgcaatggcatttcatagaattcatgttcatcgatggcaattcgtagaactggatcacctgtcaatggctaaacacagaatttctccaatatggctaaaaagaatactggactttgaattaaaagaataaaggagaacaataaaatctaacccacatagccaaagtccaaaacagacagttgaattgtccttatgaggccactcatagcgttgctagcctttcaccaccactcatcaaacaacaagtctgttggctgaggagagtatgaccaggccaacccgctgcaataaggagaaccaaaatttccgagtaaacacgcacaagacgaggaggtggagaattgtttcatctcggtcagaaagaggacagcggtcaggctgcagcagccctcgctgtaatagacattccactgcctagcagcgattatatgcaaccagccaaaggaagaagctgcattttgcaggggcccaagatttccatatacgctccaaggagaaaactggaagccccttgaggcattatatgccgatttgaccaagtactggcctgagctcgaaagtcaccaaataagctcatctgaaacacctggttgtagctccgccttagagaggatatcccaaagatcaaggaagcctgcaagggaaccaacagatgctgctccctgaacatcctgaatccatcttcgatcagtcaaatcatcaaggactgttctctggtttgccctttgtttaggcactagggcatacaagtggagcgcaagatcctcaaagcccattcaaccatctgtccagaaaatggtgttagctctgttactagcttcagaaaccacggccatggaggactgaacacaatcattcacttgacaactggtgggcaggggcaaaacacatcttttctcttgtactttatgatgccttggacacttaaagttgttggatcttgtccatggtcctgtattctaataacttgtgaatgtgcaagataaaaatatgaaaaatgttttgttatcaaatgaccgaataaaagtgtagatctgggccatgggctttaatgtttgctttcttggttggttgttatgatttgagccttaaatttgcatgtattcttgaatcagttattaactattgcatgatatgaaaccatatgcttatctattgatatggagattataacatttacatcttcatatttttctatgcctcagttttgagcagttttgtatcaacttaactaacgagaagctccagcagcactttaatcaggttagggaatggaatagttattgatgttctgcattctatattttattatattaattaaactttacattgtcacctttttaattctatatattttcttctgtagcatgtgtttaaaatggagcaagaggaatatacaaaggaagaaattgactggagttacatccaatttgtggacaatcaggagattcttgatctcattgagaaggtgaacaggatccagtttcaaccccttgtttattatcaatataattgttttttatattgagatgattagttatagacttctaggcccacgctatagaccgaaaccctgaacaattcattcacctacgtccaaacctttctctacttccatgtactcatgttttcaagcagtattgaatataatgttatctcatataaagtatggagctccatgtttcaattacagtgtctatatatgcatagatatcactggttaatttccaataggttgaaccttatatatgatgcaatatctgactccttatttattgtcatacagaaaccaggggggataattgctctactcgatgagacttggtatgcacaagtaaattatgactgttccttttctggctagaggaagtggtagtattggggtttgagccttaaatttgcatgtattcttaattatcattctgagtttttctaacaataccttattttttatgtcagcatgttgcgaaattcaacccatgaaacatttgctgagaagctatatcaacaatttaagggcaaccaacacttcagtaggccaaaattttcacgttctgatttcactattcatcactatgccggacatgtaagtgtcatatatttcttttgtctgcctactgaccactttcaggactgctgatagaggaattatttattaccagctcatgacaatgacacatatggcagcataccgtcgtagttggtatgggaaaacaactttccaagctgtgggatggatgcattttggcattcaatccagctgaaattggcatgccatgcctcgttaatactagtcaatcttgtttttatgttgatcatgttacaatggaatagagttatgcccgatgtcactcaaaatagctatgcgcagccaatagcaacatgtgcttgcttatgtgttctcccaaaaatatacagctcttaaccaattggagcatagtagaaggggctgataactagaattataataaatagtaaatatttcatgtccaatacaagcttacaacaaatgactaatatatctatgttcgagatggattagcctgctgtgtaaactagtggcatacaatttggttttatagagttgaacctgcatagtatgcagtggagacttatgtaaccacatgtttcttcttttgcaggttacttatcaaacagatttgtttttagataagaacatagactatgctgtaaatgagcatcaagttctgttacatgcttctagatgttcattcgtttcaagtctttttccaccttctgaagaatcaactaaatctacaaaattcacatccataggttcaagctttaaggtaaaaatgttattccttttatttactccatactcagtttcattacactatagttttcttactacgattatattttaattttctcttgcatcacagcaacaactgcaagctttgttggaaactttgagttcagtagaaccacattacattcgctgtataaagccaaataatgttctcaagccagcaatttttgagaacagcaatgttctccagcaacttcgatgtggagtaagaaactctatcaccctgatttattttactggatgcaaggtctaggaaaaatatcaagcattcttaaattcttttatgagtgaataatccatattctagattaaatttgataaagctttggaaaaatcacatttttggcctgtgtatttcaatgcagatgccttgcccttataatcctgagccgagatcagttaactcttgtaattccagttttttgtagtgctttctccatgctgattgacggtgtttttttttacctgatatgtcattgggcatcacatctggctatcatttgtcactctctcagtctctctagccagtcaaaccccaatactaccactttctccagccagaatgaaatttggaaacctatactcagcaaaacatgtctaattatgcctacgtggcagaaatgcaagaaaaacagaattatagggtactccctccgtcccaaaatataacaacttttagccccctggatttgtcccaaaatataacaacttctccaccaacattttcttctcaaccaatcacaactctccaccattcacttttcctacctacctccactactcatccaatcacaacactccatcatttacttctacctactttcttaataaccgtgtccaactctaaaacttcttatattctgggacggagggagtatggttttgtaagtgcatctgcacctcgagattgattcaattttcagattcgaactaactagtccatcttttattgatgaaaattttttattggccatctaaagttgcaaagcttccttatatgccactcaagacatgctattctgccactggaacagttgtttaccactctgccatgaaaaagcagccatttagatggtgcagatagaccagaattcccttagaccctacataaacggctcaatgatgatgccacatggtcccaccccttgaactccccatctccccggaattctacactcgatggcttgacagtgtgaatccagtcttcccacaggagccatatttcttggggaaccaaggccacaaatcctatctccactagaatagaggcacattgtacagagatggggagagacgacaagcaacatttggtcaataaggagataaaagatctgcatgatctcttcagatacatagcgatacctcgaactggatgcactaatttatgtgaaatgacctaatagttgtgtaatcgctgtcattagaaggaccaaaacaaatcacaatgaatataactgtagcaaggggtggcgcacagcggcagctggtagctagtgatgtgtggtgccaaccttttgctgctggaccttaagctaccattgcaccattgaccacatgcctcaggcatctctcccagaagatcaaagaggacaaacgcatggcacgtgtgctatgttgagctagccagccttggaattgctgtgtgccaaaatgggccaacgtgtacaaatatgcagaaaataccctattggttagggtaattacacagcttgctatacaatatatctaacaagtggtccagtttgaggtctcatggtgcatggggaagaagcccattggcagaggtggcacttctgacaatgggcatgctagacctgctttagagtcaagaaatggaggaagaagataaataagaaagaacagaggaagctgcctaggccccagcgccctgtgctgactgttagaatactggaacaatgtggaccagggagtagtttggccacttaaccaaaagactgacaagtgacaagcctcccacctgtcatggaaatttcctgatggataggcaataccagtgtcatataagtgatgtgaaattttatcccatggcatacaagggaatagccattctggatggggaataagggcaaataggaagtgtggatggaaaatagaggattttctctttatccatttaatttctctacacaaatatcaaaacatttggatcggtaagatagattatgaacctacatatacatttggagatgaattttgttcccactcacaatctcacatgatcatttgtgataagccatcatgaaaccctgttgcacatacacagtgagatgtcaaaacctacgaattcagttgcacagggtgaaagagttataatccacagtatgttgagaaaaggcctagtactagcacataaattgctactcaaatcattgttatggtattctaaataatgctttaaccactgtagttatggcaacacccatttaccgggtgttgtaggccattagatagatgttatgcagttatttggaccgcagcctttgaagtcatctgatttgttgccactgtaaacataaggtgtacaaaaacaccatgttaccctctttcctttgggctcaaatcacaacctcgccttgcacgcataaatcagaaggcttgagtgtttattcacttagaaaatactatgaacctatcatgcgaaaattgaacgtatttctgcgtatctttctttgccaaattacatcataaaaggcaatcttctaaactttgttcttttgaactcatatgggtccaaatgtgtaacagtagaaacacaagtacattagaaaaaaatgattcggcaataaagacatggtggtagtattccagcagataaatttgactgctattacttgcatgtttttcatgcagttcatattaacttgtattttggccttttgggatattgatttcaccgcatgcattaaccttttaaacagggagtgctagaggcaataagaataagctgcctagggtacccaacaagaagaacatttgatgagtttgttgatcgttttggtgttttgctacctgaagttcttgatgaaaggtaaatctattgattcgactttttaaacctttttatttctagaaagactaatgactttttgttggcagttatgatgaagttactgctacagaaatgcttcttgagaaagtcaatctcacaggctatcaggtaaccaatatgtattacaatctgcagttgtaatgttttaaaattttagtccatatcacttttttataatatatttggcatttcttcgaattctctaacattttttcctaatatcattgcttttaaatttcaatgtctttgttgttttctactgatctggtaaatatgctactcagataagcttctgttcaatggtctgtacttctgtaacagcctttatgcaagttcctccaaagtgtctagcatgatggaaaatgaaaaatcttcacaatcttttaaaaagcttgaactaatacaagaaatacttgtgtacatattttgtccatagatcaagaaatttcctttattaataatacatggaattctatgttaaatgcagtctccatgctatctagataagctgtgtatttaaaagttctaatgttgatgatgtataggctttgattacttttggtcttatccccacagatagggaaaacgaaagtgtttctgcgtgctggtcagatggctgagctagatgctcgaaggactgaggtcttgagcagttctgctagcaaaatccagagaaaagttcgatcatacttggctcacaaacacttcattcagttgcgattatctgctactcagcttcaggcagtatgcagaggtatatttttgtggaacaatattgaaaagactttactcttgtatgattttaagtggaggtaatgcttatgatctgtgccaactgaaggacaaattgcaagacattattatgaagacctccgtaggaaggctgcgaccttgacaattcagacctattaccgtatgcattttgcaaggaaaaattatagagatctctgttctgcatcaactactgtccaatctggtctacgtggcatggcggctcgcaaggaactccagtaccgtcagcagacaaaagctgcagtgattattcaggtccattttctggtcacaatgtattctttttctactgaaatttatgtaaaattatatcttttgtgagtgaattggtttaagctttgtatatgcatcttcctttattacctatcactaccttaacaatagttttgatatttttgtccattcagagttactgtcgcagttatttagcacactcacagtacatgggcttgaagaaagcagcgatcacaacccaatgtgcttggagagggaggttggccagaagagaacttcgaaaacttaaaatggtaagaaccaccatgtgaacggtttcgctatgttttcttttctttgaccttgactgtttgtttcttctacatttgctatttccattgtgttagacctaggcactagacttggtaataaagtccatccataagaggtccggcatatatatttaccatttcctgatgaaacttggcttcgatttactccctccttcccaaattgatcatcatatatgtttatgcactaagaccaagaataatttaaatcacatcaattaagacaccatgcacacattctcccacaatgcatgcatcgagtaaaacatcatgccaatcacaccttagcatgcacacattctcccatgttgcattaattgtattatgatgaaatccgtgtccatgcggttatatgatgatcaatttgagaaattttgaattccattatatgatgatcaatttaggaaggagggagtacatctttacctctgctgatatgccttgatgtcactgctcatcatgagcttgttatggttgcatggctggaaattacatgaaagcagaatttcaaattagtctagttataatatggcaatgctattcaaaatttgaagttgtcgataacttagtatataccatactttcatgaacctagcatgtaccctcctatagatgaaataaaagagcatgctagctttcaagtttcgccaaaactcctttacctgcaagttcatttaatagttgtaagccagcagcctgtcacacttctggtaatatggataatcattaagaccatagctagagtttcaaacagtcctagttagttcatctactttggtccgttgacttatatcactttattttgctactttcaggctgcaaaagaaactggtgctctgcaagctgctaagaataaattagagaaacaagttgaagagctaacttggcggcttcagctggagaaacgcatgagggtaaattcagagattgctttgtttttacagtcagaccgtttatgttgtatttgtctacagctgatgtaattgcacatattacatcattagattctctatgattatatatatatttcatgttaaaatataaatgggacaaagaaataactttagaaaaaaaaatgaaattcacaactagtgtactggcacaggaaggacttgctatgcctaatattgacagttctagaaatataagtatttgccaacattttggaattcttcgttaattcctatctggctgttcggaaaaaagttcgtctttggctcttgttcaccaaaagtctaaatgtaatctgaaacaccaaaaatacttaaaataaacaggtcaaagctaacatagatctggttttcatgagtgtgtctgctacatgaattgaccatttgttgatgtgatactaattaggagtaagtatggtcatgatcatcgaagcaggataaacattgatgactatgatgaaatggaattgtacagaatgctagagttatagctgaaggagatttgtggaactagattgtgtagctggaggcatagcataacgagatggtaaaatttgaggtgtagtgggagatggtggttcaagaaatgatggtgtgactagagtcggaaaggttcaatataggtcatatgtctaattaaagtataaattaagtttaggaactgtgtgaagatggggaaggtaaacgtctcaccagaacatctgttcaaaggtgacatcagaagaggcttaatatattgatagcccttatgggagattgtactctagataaacatacaactaactacatctgagtagtcaatttcgtgctttcattaggaggaagcaagaaatagtacatactacaaacatgaaaactgaatttgatggtaatcttggatatccaaacgatacgccaaggaagtggtggtaccaaccccatgtctacttatacatatttatgggattctatgggcacactacccattgctgagatagttcctaatgtattcagcaattatttcctgtgtttctatcttaatcatggatggtttaaaattgtaaaaaatggtttgtttgtatttcaaaattttatctgcgtgcttgctatttcatgaatgccactttcctggaagcttaaggtgactagaggttgagaccaatggctgcatttttttttcctgatagcatgttctaataaactgcatgcacaattaaagataacatatatatatatactccctggtcatgaaaacatgttgttctggagatgtttcaagtcaaacttttagaactttgaatatcattatcatattaaacatctagaattgatgcatatgagtcctaaatttggattgtttcaaaaaatacttttgcaatattttgcaatccaatacagattagctgtgaagaaaaacatgatcccatgattggaaggagtaattaagtaaaatcaatttctaatcacaacacagattttatttgtttcgtttttgttttacatctatgaagtgtcttatgcaaagtttgctggcctgcaggttgacatggaagaagccaagtcacaagaaaataagaagctgcaacagaaattgcaggaacttgaattgcagtccaatgaaacaaaagatttgttaaaaagggaacaagaaactgctaaagcagcatgggagaaagctgccttagtaccagaggtccaggttgatacaactcttgttaatgagctcacagctgaaaacgagaagctcaaggtaaacatcttcactacagttgattcattgcacatttggactagcaagtttgtccactttcatggtaatccggaccattcagggtattatgtatattgacaagtgaaggacatttattccattttgtaaattggtagtgtagcttgacaggtaaggagacccctggattcttttgtgagcatattaaacatacaaccatactgttggcaccaacattacaaatagagtttcttttttatacaagtcatggtattactgtgttgtaccacaaaatataatgagctaaatgacttaatccttttcttttatatgtttagacacttgtggcttctctcgagacaaaaattgatgaaacggaacagaggtttgatgaagtgaagaaagctagagaagagttgctgaagaaagccacagatgcagagtcaaagataaatggactaacgaacacaatgctaaggtcctagctatggcattgtttacatgatataaagcatatctagatattgataacccctctatatgtgttctttttagttgattggcttcttttccatacagtcttcaagaaaaactaacaaacatggaactggaaaatcaagttctccggcagcaggcactgtttcgttctcctgtgagaacaatacctgaaaacacgtctccaaaagctgtaagtgccttttctatcctagtcctacctcctttgtcttacactcatgattctttacgtccagtacaaatatcagtcttctggtcctttctttttttccattcatccatttttttggtgtttttaccttctctttactgagtcccttctttggctttccacctttgcagaattcaactaatagcagtccacacggggatgaacagatggttggaagcagttgtcttgtagagctagttaaatcaatatatacttttcagttttatgattgaatctaaattgcttttttctctccagacacctcatggtacacctccagcttctaaagaatatgggaagttcgcacagccaagaccatccttttttgagaggcagcatgtatgttcaaactttttgcattttttgtttaattcatttagtgacgttattttggaacagatgttgatttccttcatccacaactttacaggagagtgttgatgcactgataaactgtgttactgaaaacattggcttcagtgaaggaaaaccaattgctgcaataaccatatataaatgtctggttcattggaagatctttgaaacagagaaaacatctgtttttgatcggcttattcaaatttttggttctgcgatgcaggtatctttgctggtgttgactatatgtgccccttttggtcaactactcttgtttcacaaccattctgttcctgaaatgcatgacaattttatcaatattctcttacaaaaatggctccttctgtatgtcagaaacacgatagcaatgaggatcttgcatactggttatcaacttcatcaactttattgattatgttgcaaaagagcctaaaagctgctggctcatctggaggaactccacggaaaaaaccacagactcagtcatcattcctagggaggatggtatgttttgccacttcactacttcagtcaccatatgaaccatcaaatccttagaagttggagttctgtgttttcacttatcaatattacttctttgctctttttaaaatttattaacttatatatcaacatgcgccatatgaaaatgacaatagtagatttgttgagagtattttcacaatattataggttgatacttttgccaacgtattatcacttcgaattattattcgtaatcaatgtttcttacgaccctattattttgtgcagccgaagtttttcaaatttgacctaacattaaaaatgtttcgaggttggccacatggatgtcatcatttgtttcttaaaactatttacataatattatgatttaccctattcataacgcagaattttctttttggcctctcacctgaactattttatctttctattatcaaaatgtttcacttatatcctcctaccatcaaaatttttcacttcaactttccactcattcagtactgctcatctctctttttttccaataccatcctgtcaagtctagctaactgttagactcacccgaaaaggaccattgcgctcttatgtcaaccaaaaattataggaatttcaaaaaaaaaaaatcagagatattttgcaaaaaaggctttatgatggagaattttttgtgtagcttgaaatgtttcttttagtcatagaaaatgggaatactgatataagttgttatctccagtctataccaaaggaatttctggatgtaatattttcaggaaaattaagaaccatataatttactaccttctatttttaaagaaatgtagtcttttagtagtgatcctttttttttttggatgatggtttatagaatttttgttaattttaccattttattttaatattgaacttattctggggcataatagtgttttggacacaaatgaagtataaactcatccaatctcatgatattaaccaaattagcattttttccccttcgtcacattgttcataaagacatggtttctgcattgttctggtgttttgtggccaggtgttccgctcgtcaaacatcactgttgatatggaccttgtgcgccaaattgaggccaagtatcctgcttttctttttaagcagcagcttacagcttttgtcgaaggattatatggaatgatccgtgacaatgtgaagaaagaactatcttcactactctcacatgctattcaggtaaactgatttctgttggttattctgtcaattgaaatatcagttgaaagacaccattgcacaaactggtgcattattgtgagcgaataaacaatgtatgttcatgatatgcatatttgctaataaaacccattatttgttgactaggctgttgtttagtgcatccaatactatatgtctatattgttttaatgcctgcaggtgttttattagtctttttagagttaattgttatattgtgttactgcaggtcccaagaatcatgaaagccagtatggtaagagggcgttcatttgggacatcgagtttaccaaggggacgttcattttcaaatcaaggtagctactggcaagcgatagttgataatttggatgaactattgaaaatcctacaagaaaattgcgtaagaaattactacttcattttctgtacataccataactacaactagtgatggtattctaaacgttctgctaaaattttaggtcccggcaatttttatgaggaagatatttacccaaattttctcattcatcaatgcccaactttttaataggtaattgtctgctgatactaaccttaacctttcaattttgtccaatatcataaattccttattctttggctgcactgttttcagccttcttgtacgccatgagtgctgctctttcagcaatggagagtatgtgaaacaaggattagcacaaatggaggtgtggtgtggagaagtcaaaccagaggtaatgatatgaatgcacttgcatcatatgtctcgagtagtttaagttgttagttttaattctttgcagcaaaactttgaattaagctgtatcacctcactactgtgagcaacaagtgttcatcctctataaccagtcagattagcaatgtttactctaattcataataatgtgcagaaccacattattagtttgtttccttgatctgctcaatgatgagaattgcaatttttcttacgttaaccttgttaactcaagtttataattctggacaactttattataatatttcgttgtttgcctcaatgtcaagaattgcaatttttcacgtttccccctgcctgactgttaaatgccaacagtacgtaggatctgcattggatgaactcaagcacataaggcaagctgttggtttcttggtatgttacatctcatgcactcatatttcgggtccactttctattgttaggtcaattcgtgcatttcatcattatttttccttaacttggtagtgtcctgaaatcatgtatcacacagcagaagcaaatgttgacttgataacttggtgcaaacttggacagaagcaaatgttctactgcatggaagttctaaaaaaatctcaaaaaattcacacacggataagatgatattagaaaaccatacaaaattgaactaccaaattgagtcatttatgagacataaaattaacaagctactatgaaaaaacactattcctgatttttttatattcttcactatttgttatgtttatatagtttggtcttgcaatttcgtatctaatattatgttacctatgtgtgaattttcaaagataatttgaaaatttttatgatatagtttgtatggtttccaccaaagatgtggtttccactgcatattttgtttacccttgataattggcattgaatatagcatgtatcaaatccagctgtaagttggccagacagtccaagatgttgatatgtacatcgttcctcaatatatgagatttcattatgaaattaaatctattttatgttgggaactcatttagataatgacatagtgcttttctcaagcttatgtgcagtttctggtgtgtcattttattctaaaacaaaaaggatgtatttatttaaatccaccttgtcactggaacaatcatcgaaacttgtacacaccaaattcatactatttgggcaaaatcttttggtatggcaaaaccttagttgactgcattgtgttacgtttcattcaatattttctgttttcagaagtgtgcagcacaaaaagattagcagatttaggttctttttgacaatgtggtgtcttttcaaagacacttcaaaaatctcattggataagtaaagattcaaccaaccaagttacacaggggcaatctgactttagtttctttccatgaagctttcttgttgatgatgatatgactgggatgtttgtacttcacgttccttgttgatgatgatgacttacatatttctgttgttgtgtaggtcatatttaaaaaattcaggatttcatatgatgagattgtcaatgatctgtgcccagtatgctcctctctctccctccctccctccctccctccctgtcttcgcacgtgcacatgtgtgggcacacggatgacggatgggtacaggctgcaggcatgggaagataatgtatattgcattttgctgtggtaatatgcaggtactaagtgtccagcagctgtacaaaatatgcacacagtactgggatgacaaatacaacacagagagtgtatctgaagaggtaagaggagaaaccctgctaatttttatggttcaatagcaatcgtgatatttgcataccattttgagtgtgtaataaaatttgctatataaaacaagataatttttgtacaagttccttcatttatccatatttttttattttccttttatcagttgggtatcttttttctgggggttgcaagttgcaaaccatcagaaaaggtgacgtttatgaagaagtgattggtgtggtttggaaaatacgttccaaagggtcttgggttgttaaaatttccactgtgtaattcaaaaagtagatttccagtcagaaacatgcatacagaatatctaccagagtggtctgaggttcaggactttagggtgttctttgctgtaagctagtaagctaacagctaaccacaattttcaattattctgcagtgtgataagcttaattcattaggatagaaaaaatagttaggccattccaatattgtgaatatattgaatatgaacccaaaacgttgtgcatttattttattttacacgttgcccttcagtagaacacatagctgctgacaaaaatcaagagctcatttatttgccactggattgtaggtacttgatgaaatgaggacgctgataacgaaggaatcaggccaagatagttcagagaatacctttttattggatgatgaaataaggtgaacaaaaacaaaataactatgccaatatggcactggcgttcttccaaggatgtcctgaacagcaaacgctggcgtactgatattatttttttttaatttgtgtgttgcagcatgcccatatcacttgaggagattggggattctatggattctaaagaatttcagcacatagccccaccaccagaacttgttgcaatccccgcattccaattcttgaagagctgagagccctcaaagaccatatacatacatgctgcacagccagacctcttttttgtaccatcgatgttgtagatttctgtccttgcggttccttgtgtaaattattctttttggtaggtaggggttccttttcccctatgttttcgttggcttgggttgggaaaattatttgccctcccaaaaatgtgtccaaaatatgaatatagaaattcttagtttttttgtaggcatggtagggttgtagacactcaagcgccacgcttgggttaccttatcctgcacaacttgtagttagtaacatttttttaaaaagccatatcgattccattttattgtacagaactactggaaaatatcaataagttaaatcatttttttttcgcaaaggaatttctgtttaacatttaagttcaattgctgtgcaagagagctgcgttgggataaggaaacaaatgctaattcatcccgaaccaaacgcatgctaatgggtggttggatgttggggatggttaaaattactatagaaatgtttatattatattgtgtgcaaaatttgaatctataaatacttatatttagggggtgtttagatcccacctcaaaattttacatcctatcacatcgaacatttgaacacctgcatgaagtattaaatataagctaaaaaactaattgcgactaatttaagagacgaatctttcaagtctgattgttccatgattagacaatgtggtgccatagtaaatatttactaatgatagattaattaggcataataaatttgtctcgcggtttagtgacaattctgtaattagttttttattagtgtccgaacaccccatgcgacaccctatataatacctgatgtgacacgtcaaaactttacacctctggatctaaacaccccttagaaacagagataacaagttagatgaatagttgtacaccgaataaacataagcaacaaaagagttggggtgaggggagaaaggaaagtaaatcatgactttttttgtttttttttttgccatgtaagaggcttcaaaacaaaggatagggttagacgcacaagtatctatgtgaatacatgaaacaaaattgtggaccattggatctaaaatgtgcatcctggattaagtagtctacccacgcatcccctcattacatgttatgaactgttccccacgcaggctatgtatatttgcagatgcaccatttcatttccccttcctattatccaagtgaaggctctcagtcacattttatcatttcctaacgttttcgttttctaatttcttcttagaattaggctattctagaacataaagaatccgctgttcgcatcaaacttgacatgaccaactgtggatgggaagcttcttttaaaatgtcagtattgtccatcttaaaaattacatttgaaaatgttgttataacttttaatgtttcatgagacatttagcttgacatgagcacgaacccacagaagcaggcacgctgagctcgtgcaccacggtggtgggcagatggatccaagaaagcggaggaatatgagaaagatcggtacttagctcgtcgagttgtcatcgtagcccttcatctatcctccactattcatctcctgccaccattcctcggccatatttgttgtcttcaggtcggcggcgcccagatctagcaagaggagatgggaggaggaaccactgctctagattgggctgcgaatgaccccttcccactgtcgccattgagataagggaaccgagctcagcactgtgaggtcccatcacctccctctgcctcgtcgcaacagctgtcaattggatcaaattggatgccagacctctcccttacccgcaaccatatcctcccttcctctatcgacgtcattgtgctcggtaagatcgggtgctccttaggtcggcgacaaccggatctggatggaggctggcttagaaggagagtgacatgttggcgaggggaaagtgttggagtttctgaccaccggttttgtcggcctgtcggggaaagggaggaggagaatttctcgaggacgagtattcgacaaggaggattcaagggtgacgtggtctgttcaattggagggggtgggggtgggcttagctgctctcagccgagtgggcgtggcttaaatacggccgtttaggtaggtttacttgcggtttataataaaacaggaggtaatatagtatcactttcgtttttttatcatgaaccggtaccaaaagagttatatttgctggttcatcggttccgatggcccatgtggtaatgaaattgatagagatatataatttgaagatataaacacacaaacccaaagagagagggaggagggatggagtatcaaactgatgggagaactttaggtcacgactcatgaactgccatttgtgcatatgcatcattgcaggattgggagttctcaggagctgtgatttgtttgttaccatgcaaagatttgggtaatattgtagtgaacacattacatgtgtgcgatctccaaagatgcttctacaaaactgttactggtaatatgtgccattttctaggcacaccctaccgctacaaagacaccataaaattcctttggggagggtgctagtaatcgttcaacaagagaacaacggtcgattcccaaatgatcggtcagtcgcctgaagacagattgagtgccgaggtttgtcaaggcgatgtttacaggaaaccctctacaaaccctctaacatgtttaaaaaaaatcatttttttctttctacaattgtaacatgttcagaccagctgtgagaactgaaaccaaagtcaagtactgtaactgaaccctcattgatccctcaatattgagcatgtcaaaacattagaaggggaaaactaaaatgtataagttcattatatgattcgacccaatatagttgtttaatgtagagaaaatgaaaatgattggcattgctagaataagagtggttatgcgcgtatgcagtaaacgtacacatgcatgtgctctgtcaggttaagctatacagcctacaactacaaacattgaaggtagcactacgtgcagcagcactaccactccgtactacaaatcgaacaagctagcgagcaccacatacgaccacatgcatggccataaaagcaacaggtaaattgtttctttacaatgacaactctaaatgatcaacatcaaaaaaatacgtaaccaatgtccaataccctattcccccttccacattatggccaccctgtagttaggtttgggagcctcctcagcgatttatttttaaaaaacctttttatgttttaattttaaaaataaactctcccaaaacattactaaaactttggtaatcaatgtggcttcggccggtctctttacatggggtccctcacggagaaaagtttatagaaacagtgaagacgctggatcacctctttcacatcatcgaggattacactcgaggggaggaagatacaaagcatataaatgaaatacaaaccgagttcaaccaagcggcggcacatgccgaagccccacctgctgaagtggttgtcctcggcacctccccaaggcagaacccatcaccgattacatggaaaaaaattatgaagcaacaaaggaaagcaagtgatgatggtcgagaaggtctaagtcttgcgaaagaactttacagcaagacaggggaaagagcaaggccacgctcagaagaagcaaaaaaaaaaaaaagaaaagtactatttgtaccataacaagtcctcgcacacaatagaccagtgctgcaacatgcaacagctggggcaagcacaatcagcaccgccaaacagctgaggcggcgaagaagacatcaagcctacggagggtaacagaccgatgcacgtgaaggtgatggtggaaggccagcgaagacttatacaagtcatcaccaactgttcgcatcgaagaggaaaaaaaagacatcatcgggtggtgaaccatatcgcgtcgaacctcaaaaccaaggctgccatactaaagaattgcgatcaccttcagccctgaagatgcgaagggtatcctttttcctcatcaagaccctctcattatatcaggaagaactaatgcgaggttcaccgggtgctggttgatggaggaagttcggtagacataatcttgccgatgcctaccgaaagatgtgactgccgatgctagctctctcataagtcgtggtcccactacaaggattcggtgagggctcggtacaggccctgggccaagtacaatttcaagtccccttcggagtcacatgcccattggctcgcatggcaggttcccacaattcaagctgatccaaacaaagttttcatgcaagagatcagcggtccaaagggttatctcatcgatcgccatcctcgcatctgagcatgaatagagaccaaaattatctgtagacacttgcacacacttttcaactttctcacgaaaattgcattgaaccgctagattaccgcacatcacccttttattgtgttatagatctcttaaaaatgtacagtcaatttgggtctgcacatgcacataccaaaatgataaatctagcggcgaatttgagtaaactaatttttttatcccatttgttacttttatttcaccatgcattgattgaaattaaccttgcaagtttgtggaaggactgtgacacgtccgtagaatttttgtagtattacagtccctagaatatttttggctatggatggtgtaactactattcataacaagaattgttcataatgtttctcactgtttatattgacgttgggtttaaatgtgagatggtacatgcttattgtaccaagggtgaaactattttattgataactaattatggagtgataaccaaataaaggcacatatttatatataaggtgtaaaattcaaagtcataactttgatactgtgtgatggtcagctcccatgcatatgctgaaacatattccctccgtcccaaaaaaaaaggcaacctagtactagctaggatgtgagtatgtccagatttgttgtagtaggatgtgtcatatcgtagtacgatgttgagtttttggacggagagaatagacatgagacaccatgatatcaactctagaatgccatgtttcttgaaaaatactaaaaatctaccaatattaaaagtttcgttttaaattgtgctagcacttgctacccatatgtacgttctccacagataaaatttatgactagttctctatataaatatgcgctcaatcgttttaggtaacaactagaatgatgtaggagtatcaaaagagagagggcaacaagagagtcaagatatactagtggatatgcaagatgaaaacaaaattaactgcttgcatgctagctagttaattaaagcagtagataatctctgttgtgaagcaaaactccctagcttgtgtgtaagatcctcctcctgtgataggcatgcgtggcattaggaatttggatgtactgaatgtacaccggtaggatccactgaaccagaggcagtcgagagagtacccttgcaaggtcgccacgtctcttcattttctgacaagatactcaaaacccatctccttgattgatactgcgccactccgcttgcttggtggtgttaagttgcatgctactctattgaggcaatgtatgaaggatgtagcaactccctgtcttttgctctgtggttctctgtcgtgtttacaagtggctgacaacccaagaggtgaagtatgcacaaaatgcatgaaggtataaattaggttgagcatatcgatgtgaaatggtgtagaacatttgggagaatcataattgattgtttgtctatcgagtcttttgatgtgtttgtgtgtgtcatgtttctttaatttagtccttgtcttcacaatttccttacatggaacacaatttggatttgttattatgcacaaagactgctcactcgtgtgctcgagaatttcactactacaaattcgttgcatgagaaaatcgtaccagtatttttatttcacccaacttgtgcacgtgatacttggagcttggcaatatttgctatcctattctaataagtgatcttgttgtatgaaaaaaaagaaagcaaggagcaatattcagcattcaacaattaataattcttccgagttatctttttgtttaacacaaatgaactgtactacaaatgcataacacagacatgcaccaagcttgtgacaccaaacaaaatggaggaatcaacaagagcaataaaatcatataactagcctcacatttttctgcccaactctgggcaaacacagtattgagtattagtttaatctagtgaaatgagaagaatgtcgtcctatggtttcaagaatcatatgatatattgcagttatgtgctctactaatccttcaggctgagttagttacaacttacgagcattgaagtttgaactactgtagttgatgtagaacaagtgagtaccacttgcattgtgcatccttaaaagcaacagcgtcatggagaggccgggagcccgggacttgttgcaataataacttgaacaaggtgatgcatagacagttaactgagcctggagccaaagagtagatacagtctccatggctccaatataatggcccatttatatgaaaccatccacattgctatcatgctagagctaggattgggagtaatcaggagcttgcagcagagcttgcaccgagactgcatgttattaaccgcacgattgctatcaatgttgaacatgtaaggtcgtcttctttcgccaagattcgctggcggtgcagttggagaataatttgccacactttgccataatttctctcagagatttcgtcgatgacttagaaaagtgtgggaatattctcttagatttactaaagcggtagcaacatatttgagcatatgaccttactcaagtttggcagctttgtgcatacgcacctgttatgtttctcaacactcgaatgtaatttcaataattatatatatataaatcttgaaaggaattcaaaaatatctatgtgataaacctctataccatattgtgaaaatataaataaaaattttgatatacacaaagaggaaaaaaaaacaaattcagtgatgaatagtattggtactgctcatataaccaaatctatcgatgaatagtattgatactgttcatataaccaaatctatctttttttgtgagatgtacatattgaagttagcattgtatgtttgtaaactgacatgtaccactgtaatctattttattaattatctcttggaatttttcatgaccacgtaactaaaatgtaagaaatgagtatatgtgcatatatatacttgaaattgtaaattgacttcccttttgtacttgagttgtaaaacacataattctaattcgattcacatccactctgcggtagagagcgatgtttaaatttcaaaagtttgatcaaacttgtcctaagcattaaatattcatgaataagagtaaatgtggaactgaaaatgtggaactgaaacaccaagcttgtgatcaaagaacattttgttgaaaatatgatacatgggctatcaatatggatctctggtttctcgagcagatcaaacaagcaaaatgagcaccattacgagtggtccatgagtggtggatgccactggtcaccagtaaggggctaatcgttcacaccctcatcctactagcatgatgaggaattaggaaaaaggtcatgttattttctccaacaagagttggatgaagattaagatttttgtggcacgtttttcaaactaataaacggtgtgtttcgtgcgaaaaccttctactctaaaatatcatattaatctatttttcaggtttgtaataattaaaactcaatcaatcatacattaatatcccctcattttacgtaaaaaacttaatcttaatcttcatcttcgggagaaaagaacaccatcaaagagaaacagagagtgttgctggtttggtaaaaatggatttcatggcaacccagagagaatcgagctccgtaccgcggggatttcatggtaataattaaaaatggtttggtaaaaatggatttcatccctaaaagggatgatgatccgtacctgaaaaatagcctccgctacgctccggcccaagcctaccgacgatgggcctccgctccactacggcagaagctggcctttattaagtgcaaatgaatttagatcacaactcaacaacatatacatggcatgatgtgcagcatctagttttggctttcaactggatcggcatcggcgagattcacgcagcctgacttaaggctgctgctcgtcttgatcgattctaccgtggagtcacgcgtaaaccgcatcatttcttggtgctgtgcctctctgatgcatatggcaagcggataaattgatttgaatgaatttatgtgaaaggaaatgccgaatgtgcgcggcaaaaatcaactactctctccgtcctaaaatataaacatttctagctacgaatctgtacaatttagtgcctttgcttactctttgcctttagcatcttcttccattaaaacaaaatttgtgctgagactttgctgtatgagaattgatgtgtgctacgagaaaatatctccactatatttgtttcgccatgcgcaaattgtgcatgtacatataagatttcaaactaaattaaaatttgctatactgatgcaatattcagcattataaattaatgatcctttatacttttccagtgcaacaaggagggttttcttaaaggtactacacaattctatactttctatataaagttatatcccataaatatattatatattaaaagtccattaaacttcctacgaacgctctcaagccgccatctagactcctacaaaagtttctaaaccgccatgcggcactctaataatttaaagaaaattctgaaaaaaaagagaaaaatatctaaccgtcagttttcatttaaagtagtggacctaatattattgacaattggatcaataccaaattacatatggtagttgcaatgcttatttatttgattgcttgatttatcattgacattaggcaggataattatgtatggcatccgcgtgctcgattgatgcatgcatccaattcttaattttatttttatttacacgatatacatgtacaccataatttgttatcatgaattattagatctatttttaatggatactaatatgggcgtgaacttgcaagcactaggtatttacaataggagtgatcttggtgctgtaaataaataattatttttagacgatctacacgtttaatttatgatacatttgagcagccgtagtttttaaattaaatcaacaattcaagaccatgatggctaaatgtttactagtatatcatattatatcttacgggtccccctctcacatattttatacaaccatgtattcatgatatatagcattccaaaaataattattacacaattatatttagccatccaatcatattcataataggctatgtggagcctcgcacacactctaaatgaaatgttcacagatggattgcctatcaaactatgcaatcatattaggcttaagaaatccatgtatttagtgtagcctcatgtcctacctaatacatctgtcaataaacaatggacaacctaatatcagtaatccaattaaaaaaaagagtgaattgcattttgggctaggctttattacccaagttgcattttaaaccatacatccatatgccttttcactttacactaggttttgttaccaaactttgcaatatggccctatggcccgcacgtcagagcgttctccaacaacgccggtgatctcttcttgtttctaatcatagccggcaccagattgatgagaaacaagagagagatgccggactgctcaagctcaagatcttgatgtgagcggaacaacataatagaagagggagggatgcaagggaaaatggagacatgaacacagagacaatgggtttgggactttggggaagaagaggtcagagcaaagattcatgtcttgctctgttagtgagctcgactttcgtcaggcgccgggactcgatgtacactctctactcacaccttgcgcatcttggtggactacttcagcaaaacgtccccgtttgctgctcatcgcaaaggatttgacgtgccccagttcccaaattaaaatcaatgcagcacctgatatgaagattgaagccatttgaggctcctaattgccaaatcaaagcaggaaacaggaggaccttccaggcttccaatactcaaacaaacgcaggaaatggatagatcctacctgactccctgctacagcgaggagctgcaagctgcttccttcatgagctcaacaagtttggcaagacgctggagaggaaagagatgaatagctggacaggaaagtggtgcaaagtgaatccttttgtaaacttctctggcccaatgtaaaaatctagtctttttcctagtccaagttgcaactttggtaaaaataagtggctgcaattcactctaaaagaatggaaaacccctttcttttagtttacacttaatttggtaggcatgttttctaaacaaaataagtctaccttctatttagatgatgaagaagattacaaacaattgcatacagaaattatttaaatatgatataggagtagtataaaggtaactaataggttataattttataagcaatgctaacgaaaaaaaattgtggagaaaccgtacttttaaagagtggcatatattctctagttaatattccatctttattttgataaaaaaatatttcatctttataaatttctcaaacccaacctaagatgcttgcccacgcattcacgcgggctatctttctagttaaagactaaagctcaatatgcaaccatgccacgtcatcaccgactagcaataattccatatctaaccttatacaagtgtacaacatcatcttcaatttatttaattctacaaatcaacatgcaaccatatcgaacaatcatcgctcatatcatttgcataatattttaacaaattcatctatcatttttatactgttgagcatatacttataaatatgtttcacattaaagcgcgggtatgatttgtttgtttcatataagtaccgataaatctcgatgtttcattttttttcctttttactcctaacttaattgtaaaaatatataatgagaatttcttagtaattcccgcaacaaagcgcggagaatcacctagtacacgagaaagcatgcaccaagctagtgactacagaaaatggacgaatcaactatcaacaaaatcataactagcctaccctacgggtttaatccactacaacatagacaatttttcatactgtcaaaatcgattttcacaagcggatgggtggacccgcctgtacccaggaatctgcgaaattcgctatttttgcatgtgacgagcaaccatatgagaaaaatacaattttgcatgcgggcgcttaaaccgtccatctgaaaaaagaaaaatcagccaaaaaattaaaattctgaacaaaatccgaaaccctagcggtcatcgccactgtcgctctcatgcccggagccatgcgcacccccaccgagctccccacaactaggatccgcacggcggagccatgtgccaagcgccgccaagatccccacaggaggtggagaactggatctaccgccgccgaactccctggcccttgccgctccctctcctgctcaccgctcctggatccctccagcgtcggccactcctggtcttgctcgctgccgatagagaggagaggagaggaagtggagatggaggatccaccgccgctgagctcccagccgctagatcccttcggcgtcagtcactcccgcccaccactgacggagaggagaggaggaggaggtggagcaaaggtggagaggaagtggaggaggtagagtaagtggagaggatgaggatgagatgagatgagagagagagaggacttgatatttaagagcgagtttgatttggtgggctggtggcaggcatacctcttaagaggcccacctacgtaaattgattttcgcaagtggggtagttaagaggcccacctacgaaaattgattttcgcatgtggccctaaccctaaactcagagacccgcgctcagtgcagtgattttgacatgtagaaatagttatgatccgcctgcaatcttaaggactctcttaaaaaaaattcgattatgtagtattacttaaaggaacgagaatcatgtcgggtatttgagagaaaaagaaaaaaagcaaccatgtcatgtggcattccaagctagttgagtaatgagcatttaaggacggtactacgcagtacactatacacgtagcgcgtagacaagcgagcaccactacgcatgctcttaaaagcaacaacaaaattgtgccaccgtgattttccttattgtgtccataatagttccaagaaagctgtatagctaggaatgagagtaatcaggagatggcagcacggacacattgaggggacatgtaaactgaccgcgtgagaacggtctgcactccatagtgaaggtcgcgtggtttcaccgagatgcacagccagaggtggtggcacagcgacagggcgacaaggggttttccctgcttcggctactagcggacgagagcttgcgcgagtttggatgaaactgtaaggcgtatccttgccgcgatcaagtatggcacgcatctcatcgccgtctgcacgcattatatttgttccgtacctgaccggaggcaaatccgcagctttgcaccagtatggtattcaaatgtgtgttctataatttgcatcggtagagcctctagccaaaattcaccacacacacctctttaaaatccgctaaaactgggactcatttttctttatgaaactgcctgtgtgttttggcagcatcaaaattaacaaaagtctcaggctgaaacatttgccaaggcaaaccacccaagtaccttaaggtaccggtacctcacggaaccaaatcgttcccgatcgttagatctaacaatgcctatcctgcccagctagatctaatgatcaaaaatgatttagtaccgtaaggtaccggtacttcgaggtactttttattggacctgagtaaatctgctatattgtaccacatcatcaagaaacgtgcaccaagcttgtcaccagagaaaaatggaagaatcaaccatcaacaaaataataactagcctcacgattttcccccaaccatgactaacagagaacatgggaaccctgtcctgtaatctatctattatctatcttctattatctatctattatctatctatctatctatctatctatctatcttctattatatactaaaagtccattaaactccctacaaacgctctaaaaccgccatgtggcactcctacaaacgctctcaagccgccacgtagcacagtctaatcccaccgtcgattttcacttaaattggtggacccgttattttacaccattagattaaattattattaaatataataccttcctcctctatggacgatacaaacggtaccactgttccccctgcgtacgtacttaagattgataacaaaacaatagttttacctcttattgctggaaggaaagcacggagatataaaaagacagtaaaaatacaaacgtccgtgctattgtcgggaaaaaatgacggtttctagaattggatttttctaatatatatatatatatatatatatatatatatatatatatatagtccattaaactccctacaaacgctctaaaaccgccatgtggcactcctacaaacgctctcaagccgccacgtagcacagtctaatcccaccgtcgattttcacttaaattggtggacccgttattttacaccattagattaaattattattaaatataataccttcctcctctatggacgatacaaacggtaccactgttccccctgcgtacgtacttaagattgataacaaaacaatagttttacctgttattgctggaaggaaagcacggagatataaaaagacagtaaaaatacaaacgtccgtgctattgtcgggaaaaaatgacggtttctagaattggatttttctactatatatatatatatatatatatatatatataaagatcttacctactgttgcggaaggaaagcaaggagataaaaaatacaaagccaagaaaaacatacgtctgtggtactatcgggaaaaaaatggtggtctttaaaaaatgatttttctacaatataaagataaaatatattatttgataaatataactatgtagttaaactaaaatctataataaaaatatatatatccaatcgttaaaccatattatataatttttttattaaaaaaacttgcgtccgtggtatcgtcggagaaaaaattgatggtctttataataggattttttacaatataatgatcttacctacagttgacggaagggaaggaaagtacgtagataaaaaagacaaagccaaaagaaacatatgtaagtggtaccgtcgggaaaaaaattaacggtccttaaagtagtatttttctacaatataaagataaattcgattacttcgtgatttttttaaatgtgctaaaatattcaagcaagctaaatgatatttcgtgtatcaccatctaattgactttagatggtgctaaatgcagttttagtagcatgttgttctggccttctacgcattccgggtatctccgtttatttttttttttgcatagaccattcaaaaggtgaatcatctgtatatatgaacattaatcgtctttgaatatatttttgttatatatatacacacacatgaaggattaaatttggagtccatttatattttacgatataacaagacatggaagtaggactaattaagcttgacaaaaaatgtgatcaccactacgatgaatcacaaggcaatctccataggtgcaatgaccacatctcaacacggtgactaggagccgcatgaaaaccgtatggcggaggaaaaggaacaatgagtttagctaggtcttactattgatgttttagatcatgaccatggtatttacatgatatggggatcgttggtaccagggtatatgcgagattgaagtaaaagagacagagataaggatttttatataggtccgggccccttcatggaagataacaaccctactcctgttggccgaagccagtgttgctcttattcatcagaatcacacaagtataataattgggatggcttatctaatcgttgttgatttggcgacatgagcaccaacacgtagtcgacgacggggtagtcttcctccttgaagtactcgcggagattaaaaaatagtgctagatccctcttgacagccttcgatggcaccagattagttatgtctaggttaatctccaatgtcgatatttggtggcgtgtattagtttgttctgacttgtcttggtttgtgtcccccctctcctcctaggggtcttgtatttataaccatagataccccctctccaagtagaactagggagaccaatatggatacaattcgagtagtccttatagtgtccatgtagaactctttttgtccttccttatctggaactccttctatatacgaggtatgattctgtataagacttggcattatggtgggaccgccgagctgagtcgattactattgggtatgtgttatccataacactgacacttatgttttcaccaacgaggcccaaagcattcaatgaaaaaggaaaaagaaacaccttgcttttaatttaataagcatctttggtctatctcctttttagatgatgatgatgataatagataattgcttatatagattaattaaatactcaccacaagggatcaggtcttttgtgatgaaaaacttcatcactaaaaggctgtttctcatcacaattaccccccttgtgacgaattttggggtcgtcactatgttgtcaccactactggcgtcacaagtagcatagtgatgattttttttttcatcacagataatggctctgtttgtgataatcctatctcaactaataagcagtacattagagatggtatcgtggtcacaattacaggagacactagtgacaatagtgccctcacatatgtgaacgtgtagtgatggaatttttttctcacaatattgtcgacagttagtgctggtttgctcgtcactacatattactaattaccgataactcaccatcacaaatatacctttgctaataacttttctcacatatgatagggtttttgtgataagatattaatttatattgagaagtaaaaaccacaagaagtaggatatattgtggtgaaatgacgtgttatttgttgcaaaaactggtcattctttacaaatgtagtagtgaccaagctaatatgtatatgtgacaatacctttatcacatatgaagtaatgcatcagtggagaaaaaagggtattgttgtaaggaaaacttttatcactaaaaaaataaatatccagatgcaagttttatatatgtgactaaagtcttgccacaaacaacacgtcttttatgacaatatccagcatgtgaacaatgacaaaatctaatgatgaaatctcgatagagcaatggcaagttcaaacattcataactgagcacccctttattcatgaatgattacagtatgctcggaatagagcacttcagaactcaattgaaatatcacctaaactaaaaagggttcctcacactagaggaaactatcctttattaatgaatgataacaaagtgctcatacaaagagcatttcaactaagaccataactaaattgataactgaacacctaagcaacaaatgaaacttgggacacggactctagaatgctcgcctagatggacaaaactttgtagcaactccacgactccagtctttgtcatcttggaacttcctacatataatttaaaaataacattaatcgaatgaccactagattgaattagtaatcatgtatgacgtaagaaatcttacttaattgtttggggcacttgaagataaagcaccaccagtgccacccatgtgtgcccacattgctttcattctttcctcaagtttctggtccaacaaacgctccatgtgaccactttgttcctctacggttcttttctgagaattcaactcttcacgctgagactgcaactcgccctttaattgcaagttttctactgtcaatttttgaacttcttcgagcaaagcagcagcttgttgatgtgcttcattggcttgctgttgtgaagcttctgcttgtgcatgaactctgtacctctcttgagctccctcattgattgcactaataccaactccacgcgagtggtttggctttctgccaaggactaatgcaaagtgttcaaccattgggatttgagcagctgcaatcctttcctggtttgtttcagctgttgtctgcagattgttctaaacaaatcaaaccaaatatgtaagtccatattaaaaaaaactcatgcagtaaaatgtaggtaacaaacatttttgtttaccagaatttcttcgccattaggaacagaccatgttccattcttcaaataagttgccttccaaacatctatagcactaggccattcacctgtcactgggtttctctgcaattatatcacatacaaaagaagccttataatttatatatacaagacatgtcaaacatatagtttaaagatataagtgaatgacaatattcattaccagttcatgtgctatttgcactatagactttgttccaacatgtgatttcatctcttgctttgatctgttaatggaattctgtttgctccgtttctaaaaaacataataatctcatacgaataatgaattatgaatcatattgtattaattgtaaagaaaattaaacaagtacctggaactgctcatcactccataagttatcaatcaaccactgccagtcctctggcgcaacatgactaggacactgttttgttgtgcaataggtcttgtacagtttgtggcgtcttacattgtactgtcgctcaacttgtgtcattacacattggtagtctgccattgagatcttagggaattttgcctacagaatgatagtagatcatacgaacaaacaatgtacaaaatcatgacagcaaaaagaaaacaaaaatgtacaaatgaaatatactccaaccagatgacataccttcaataaattccaaattgatgacatggttccaggaaaagctttttcaatgactttccacttcttcaccttaagggggacctcttgtcgcacacagacagtgacctcacttttaaagacacttgtgtgcctaccacagacttttccaaactgtgcagcaaattgaatgtctagcggcacaccccttgctctcagttttgcaagtgttccattaatggtgagacccctacctttcctacgtttgagacctaattgaaggaagaacttttaatttatttgcttgtgaaggaatagattaatgaagtgaaggtaaatatgttaaatacctgtgtttccggttggtcccatccgtccctcattcctagtattgggtatgacttgtcgagtagcatcatccgaagtctccatctggttcacggacggacgaacttgggaaaccattttgacctacaaaataagaaatgagtacaaacagatctactacaagattacaaaccaaattgactaagatagaaatccccacaaaacaccgatatactattagattgagaaccaaattaactaagaaagagaatcccaattaaaaatggatattaagttgcatctaattaggaaattaacacaaatcataaatgcggaaaaacaagacggagagagtggacgccagaaggggcaggtcatatccctgcgacgccacgctatcatcaataggactgcagtgatttggagatgatggttgtgtgattgtgtcctggcagtggtgggtgtaatctctcaaagatggatgtactctagggctatgcagtgaataaaaattggggaatgccgaatggatcctataggattgcgaggatagcaaagagccatagtatatttgtttctttacctttgactgcaagtgtgtgcagggatcgagaactctagatgcgaatggattgtactatatgggcagccttatatagcgaggtaactctgtcaatttggcgggagtaaaattttgctggcaattactttttgagggaaagtatgttttgctggccgatttatgcgtgcgtgcataacaaattagtttgtttgtgctgatccaaaatatttgttcaccagcatttgttaacaacctctcataaacaaatatggcaattgtttaatgaatcaataacctgtggagtgaaaaaaaatgatacacacatgcacattaattgttgatgtgggttggcaccagccacgtgtacctagagatggacacgtttagtgttgcacacatgctcagctgtaatttatccctttcataatgcaggcttcaggtcatcaatgttcagtgatcagcattaaattaatatctgctaccacaagatattggcgtcatataatggatagtagatgtgcagtcaattcatatgatacgagcagaaatattgactgttaaaagttttacttgtagtgctaatgttttttaaaataaaaggacgatcaaaattgagcgcgggtactcatggttacacctaaaatgagacggagagagtattcacttcaccctactcacttcataaaaaaaaatcaacatcgtcctagtaaacgaatatgaacataaagtatgtccagattcattgtagtaggatatatcacattctaatgctatgttgcctttttttgacatagggaatataggataaagcttggatgacgagccaacatttaggcttgttaccttagagcaggttgtgttcgagaggtggagttcggaaccacctccctgcatggaaaactaataagccagctcattaacattaacaaagctaatactaaaagcttagcttggctcagctcgtgagctggttcattaataagcatatgctcattatctaaaaaaaataataagcatatgctatattagatgctagacatctggcaaaatcatgtctctgccatagggtatcgtggtcttgtgataataatttgttggaacacattgtctgctctgacggcatagcacgttttagcaaattatcatgatactgtaattatctccattttttataattaaaaaatatttatgattttaatataaaaaacaaaaataggctagagggccacgccgaattgcttgtttttgacctcacaggatcaccgcccatgtcgcttgccaccgcacatatgacggagctaagaaaaactgtacaacaaacctgcaatggataaatcttccatgcccgcctatagattaaatgttgtgtaccagtgcttcccgctaaatttccaatttccctcgttgttttcttttgttcccgcaatttttcggtggaagctggtatccttcaaagggctataaatagtcatcgcaaacatctggagatagttggaggtactgaatctgacctagtaagcacttttgggggagcaacacagttgataatctagaggagttaggatctggggtggtggcaagtaaagctgcaatgggcatagacttgaatattgcgtctgcaggtggagatgatggattaggagaagcatgcaggaaagctgctcgtggcattgaaggagattcagaggcaatctacttcagctaaacggaggattggtgatgaaaacaatcgagatgaagaaccacacaagaaagctgctcggggcgttgacttgaatgtcatgcctgaccgagatgatgaagaaaaccagagacaatctactcttgcagcattgaagattgatttagacgaaagccctgtacatgaaggagaaccgcagaaggaacaaaacattagtcaactcgatgagaacgcgaaagccttcatatctgaattgaggaagatgtattttcctatttttgcacgattcgattattagtactctccatctattttatttcatattacattctgtttcatatatgttcaaataattgagtcgtgatctatgtatccaatttcttggtgattgtatctataagaaaagtatttttttaggcaccaatattattgtattgcaattatttctgacacatttatgtgacatagatttattgttctgtttccctacatttgtcgggctcttattctgtttccccactttatccctagcgtatattttcttttcacctagttggattcatattctgcttccctactttatccccagcgtatattttcttttcacctagttggatacatattctgtttccctactttatctccagagtagatttgttttgacctgctggtatatatatgtacctggacgcatcctccatgatgccctaaaacatcgtagactgcacagtacaagcctgagattgattcttcaattgacgccgtctaactttgtatggtatcccttttcttattattagtttttgcaagtagttgtttattcttttcgcaaaacagtattccacaactttcaatgtgaggtgataaatttcatttttcaactatagtactagtgatgtttatgtgcatatatcgttacatacttgtccagcatatacaatttgtctcgtttactatcatgtttgcaagcatataaaagaaatcgcgtttactatcaggtttgcaagcattttatttccatggacaaaagttggatgaacatcaatagaactcttcctcaatatcaggatggagttaatcaatttattcagtttgcattcaaagattacgatgtggataagttgcttcggtgtccatgtagaaaatgtagaaataatcactttgctaatcggaatgaaatatgtgagcatctaatgattcatggagtgaataaagactacacaacatgggttcatcatggagaaaccataccagaatctgatgaagatgcaaattgtgagatggaagatcaagctgggtttcgtatggatgagatgacgaatgatttctggaatgctgccaatgcaaacagtgactcatcagtaaacattacaacacttgatgcacaagaggatatgggtaccaatataataattaatgaggagaccactaaattccagaaattaatagatgatgcagaacaagagctctatcctggatgtgatagtttttcaattttatcttttattgtccaaatgttgaatatcaagtgcctttatgatcttagtgggaatgcaatgaatgctctatttggtacattgtgcagcgcttttcctagcaacaataaagtccccaagtcttatgatgatgctaaaaagattatgtcaaatttggggttagattatataaagatttatgcatgtttgaacgactgcattcttttcataggtgaatatgctaaagctgaaacatgccctgtttgtggaatttcaagatggaaagaggatggagaaaatagtgctcgcaagtcaaggaggagaaaagctaggaaagttccgcagaaggttttatggtactttcctttgatcccaagattaaagcgtatgtacatgtgttcaaaaatagctgttcatatgcgatggcacaaagagaagctagttgatgatggatatatgagacatccagcagattctaatgaatggaagaactttgacaagaattttgaatcattcgcattggacgcgcggaatgttaggctaggccttgctagtgatggatttaatccttttggaaatatgagctcatcgtatagcatatggccagttattattgctatatataacttaccaccttggatgtgcatgaaagattcttatatgataatgtcaatgcttatccctgggcctaaagcacctggaaatgacatagatgtatacttgcagccattgattgatgaattgatacagctacgggaaggcgtgccagcctatgatgctcatgcaaagtcctcctttaagctacggggaatgctgctttggacaatcaatgatttccctgcatttggtaatttatcaggcatgagcacgaaaggaaaatatgcatgtccttcttgtcacatggacacttggtcccataggctcgttaatggacacaaatactgctatatgggacatcttcgcttcttgccaacaagacattcatggaggagcaatgcaaaatcttctgatggccaaaaggaaagacgtagcgccccaaaagcgttgtcaggagatgacattatgcgtcaatatcaaaatttcaatcaggtactctactaattatgatatatttatgcttgtatcctatctggtatatctgaaagtaaattattatactatttgctattctatgccttatttggtattacattatagagtataagaatatgagtagtatattattgttgacatcactttatgcattcaggttaaatttgggaaacataacaataagagaaaacgctcaagcacattgtatggagtttggaagaaaaaaagtatatttttccagctgccatattggagtacgttatcgataagacataatctagatgtcatgcacattgaaaagaatgtttgcgatagtattgtgggtaccttgttaaatctagatgggaagacaaaggacaatattaaatcccggtttgatttggaactcatgaaaatacagcctgaacttcatgcacctccaactggtgatgggaagttcttatttcatcctgcatgctatacaatgacactagctgagaagaaagcattttgtgagttccttagagaaataaaagtgccagatggatactcttcaaaaatttcacactatgtggatgcaacaaaagctaaaatatcagggatgtagtgtcatgattgtcatgtatttttacacagataccttccactttctattcgtggagttctgcctgctgatgtttgtgaggctataattgagctatgtagcttttttagagaaatttgttccaagaaattagatactgaaattctcaagaagcttgcatcatcaattgctgttaccctctgtaagttagagatgattttccccccttcattctttgatgtaatgttgcatctaccaatccatttagcccaggaagctattactggtggacctgtccagtatcggtggatgtatcccattgaaaggtttttgcgaaggttgaagtcttttgtaaaaaacaaagctcgccctgaaggatcgatagctgaggcatatattttgcaagaatgtgtaaatttttgttctatgtacctgcaaggagttgaaacaagaatcaatcaaccaagtcgaaacgaggacgtgcagagtgacaacagcagtacaaaatttcagatatttggtactattggcaggccactccttggtaacaaatactgccagatggatatgaatgagttggagaaagctcggatatatgttctaaagaattgtgaagaaatatcagaatacgcagagtaaacaactactacttactctcattttctaatatgtaaatgctgtcaaaatttaacatacatgtacatgtcttgcagcattcacaaagaccaacttagcatccagaacagtaaaggtgtggaaaagtgccatgacaaagaattttttgtatggttcaagaatcatgtatgtacacgccataataaaagtatttttttttagattttacaactatttgtaacctgtataaacattcttccagatatttgagaaacattccaaaggatctccagatacatcagaagagttgtttgctctagcaagaggtcctgatgctcgagtaacccattacacaagttatatgattaatggatggagatttaacaccagggaccgagacaagttggttcaatcacaaaacagtggagtctttgttaaaggtgatgaagccagtggaagcaaagactattttggtgttaattaaaagcaacagcaaaatcgtgccatcatgggcatgccgggctagcttgttaaactgcagcgacaaatataatcgaacaaggtgatcagaggcaaaatgaatgagtgcgtactaattggagtaacggttgtgtccacgactccggtatatataaatgtagctaggattgagtaatcaggagaatgcagcaccgatgcagcgaggctataagtaaactgagcgcgtgaacacggtgcacgttgaatagaggaggtagagtgattgcaccgacatgcactgccaattataggagttgatcacacaacatacaagagagcgacaaggcgctgttccctgatgagatcgcggcaatcggggcagctggttagctctggctgtgtttagttcacaccaaaattgaatgtttggttgaaattggaacgatgtgacggaaaagttggaagtttatgtgtagaaaagttttgatgtgatgaaaaagctggaagtttgaaaaaaaactttggaactaaacacggcctctagctagcgcggattttgacgtaattgcaaggcgaactcttgatcgatcgatctattgtcacacgtgagtatcatctcatcgctgtgtctctacgcatccgtggcggtgccgtgtctatctagaggcaagctttgcaccaggccaccagtatgtttttttcaaatgtgttctgtggtttccataggcagcgagccacaatttaccacacctctttgcactactacaaaagttgagtgttgccggttggtaatcggacataggagccggatttttctaactgacacctagcaagcggcccctttgagaagggctcaaagatacccgtttaggaaccaacacatttaaaatatcagtaatagaaaaaaagaatggtcagctcaagtcgagccgatgaatcgagtagctccccttcaccccgaccagattccatcaccccattgccccttattttgatttaacatccaagaacacattttaacattcatgtatcaacatccaacaacacagtgaatacagagaaagaggagggatggagcttctccggcgacgagcgtggtgccggatgcagtccttgagctcgagcccattggatatggttatatatggtgccagcgccagcaccgttgatgctcgcggatggggaggacaccgccgaatctcacgagtggggagggcgctactactgcagctcgcgggtgggaagggagagagcggcagcgcggaaagggctcagcggcgcaaggaaggaggcagcggcaacaaagcagggaaaggggcatcgatggttcttgacggtagagccgcaggacacggggcagcgaggtggggatccggcgccagcgggccttgtgagctgcacgggaaagggggtgacaaggagcggatccggtgctgacgagcctcgggaaagtggatctacccccgcgggcctcgggagcgacgcggcgaagggggcggcagcggcgcggggatcagatccagcaccggccatccacgcctccttcgggagcacgaatccatcctgacctcgtgctctatgatgtgatgtgaaagttttgtgatcaatctatgatgtggaatttgtatactgtgatgtgaattagtggaatatttgtgctccatgctctatgatcataatcaaaccatttttgtggaacttgtgctcgttgatgtgaatttgggatttggggatatggatttgggaatgctgggcaacattatgtaggcattttcatttttgctcgcagctagagggcagctgcatggggtattttcaatatttttttgccgtgaaatcgattatccctgacggccagcttaacacagccatatgaaaaatgaattatcactggtggctcgcgtgacacaaccgccagtgaaaatcaattgtcactagcggttgaagtctcgcttgtgaagaccttagattttcattgaccgttagttgcagacggttagtctaactactagaaaggactgattttagtcaccacgaaaaacctttcttcgtagcagtgactagctagattgaaccaggaccagctggttactttgtgtatctaacatgtgcaaaaaagctgtttgacaaagctaaatagtttggcgatcatgcccaagcttgaagtaaagcccattcaacagtaggatgttattgccattatgaattttgcgtcatattggtgtcaactccgaaagacgtattgtaaatcacattttgtcactttaagtttatgccacatatattgggtttgctttgctatttccatcatcagctcccacacgctcactactcttaaatatatatctggcattacacaacaacctttggaatggcatgtttcttgaaaaatacaaaattgtccctgtcttaaatgttggtctctctgttttttaaaaatgatttttgcatagaaattcactatatatatatatagtaaaagaattagtacacaacagaagaaccatatatatgcttatctgttcacataaagaaagatattcggttatatgcacgattgttgcaaaatattctctccgtcccataaaaaaccaacctagaacagatgtgatgttttctacgattcagattcatcgtgctagaaatcatcacatcatgttctagtttaactttttgtatagggcggagggaagcccggcccagctagctagctacccttgaatgttgcataaatatttacaccactgcaagcggtagtactagaacacataatggccttaataagcaacgagccaaacgatgtataggcatctctctccttcgtgtaattagaactcagagacccgcgcaaacagctgatcatatatagaaactagagagagatagacgaggaaatggagcatcttgatcgacaatcaatccgatatgttagagtattacaggcgccctgatcacaatggcgatatgcatacaaatagtatagggatggaaggtattgggagctgaaactgaaagcaccgtttcataatacaacccggcacctcttgctcttttcacgatggcgcgtgctaggagacgagccatagaatcgttggtcccgctagttagcggagaggcgctgaaagcaaatgatggcaaaataccacacggttgaacaagagcaagtaatggaagttcagtatctcatggagagcatgcgggttgtcgcagtaacgtgcgcagtgggcgatgtttgggcttgtggctgcagatcagcaaattcagtttgtttggttttatgccaatattgtttgccttgcctattttgtgcagttattagcgagatttagatgttaccaaaaattttgcaaaggtgctttgtttggattgcttccaaatttttatctctactagaaaaatacccgtgcgttgcaacgggtaaaaaaagaataatatgattctatttatgaagaaagaaaattaagatatatataccaatttcatttatactttgaagatatgttttataagaactacttgtgtgtgcgcgcgcgtataatctaaagattatatatgttaatgtcaaaaaaaaatctagctccatgtaaaattgagttcgaaaattaattcgctagtttacatggtacataatcttttagggtgtgatctatactatcttcttaacttttactctatcgattttcatgcacacgtttcttcaaacttctaaatgtgcgaacttaaaaaaaatatggtaagtatagatgattatggttcaaacagtagtagggagggcagcaccggtttgacgtggatgtcaactgtttggatttgtggcagttattttggatagtcgtcgttattttatcttatgggggtcatctagccaggcatagtcgtcaaagcgtgtcttttttgttaaactcaataagattgaacatatgccacttgaatggtgattgttaagagtgatgaaagggggtgcatcttgccatcttaattggttgtcatgcgccactcgattatagggcccgtatgacgcggcaatgaccaaatccgatcgcattgggcggctaggatctgccgtacgtgccctcccgtctattccggcgcccgatcgagtgagcgagcgccgcacggatcaacaacagcgttcgacgcgccagcgggtggcaaacgcatgcatgccgcccgtcgatcggcccgtgccttcggcgattccccatcgactgggcgcccttttcatttaaagggtaccgtttccgatcgtaccgtttttagctattttttattttgttttttctaatttttttcatcatattaatgtcgatactgaggagtttaatgataaatatgatcaattaccggccgatcgaggatcgtttccatagggatgctatcgattccgaccgtttccgatcgttttcacccttacattgtcctccaccagcgagagatgaaaacatgacgagcggcggctgtgaatgggtagaaaccgagcatgctgtagctgtttgttgcacttatgggcagtcgaatgcgctacaaacggcgatccaaagttggacgtccctctaacatataagcctctacgccagaggatctccttcctatccatgcatatcctctgagaaaaagccctccattgtattggttccactcaacttgtgcttatcatatttgaaacttgctagaatttttcatgtctaacatatgatcaagttgcttgtatcagtacatcattaaggaagcaagatgcaatattccgcatctcagcaattaacagttctccggacatttttttttttggaaaagtacatatttgatccgtcgactatggtccttcgattttagtccactaactataaaaactggttacccgcaacaaaacaaaaatataaactagttacaattggttaccatccatatatatttaattcccgagcttaaatgaggagtgcttttttacttacatgacatcacatggcatcagttagttaattaaaataagggtgtggagagagaggaaaagaagatcagatagacaagtaggttgtagtatattcttcacttttatatttattgcgctattatatactagggattaatatgttgggcctgtttggcacagctacagctccagctccacccctcctggagctggagctcagccaaacagttttagctccaccaaaattgggagtggagttggatggagctatctcacaaaatatactagagttgtggagctgggtttagatagctcaacaactccactccagactcaactcctgaagtaatatttaggagttggagctgtaccaaatagccccgttgattcatcactattccaactagaatcaggctaacgagtacatcataaatccactagagcctgtcgtgagtgcatctctcgaatacatcatgcatccactgggaacctgtcgcgggtgcatctcatgtgaatttttagaatgttgttgttgccatgttacttgaatggtggcgctgcctttaaaaatcacaatcagggcagtgctcctatatgacatggttcactgaaaacaaggcagctaagtagtgctgatgattcttgagggtaaaaaaaaaacaaaacagtagaatagaaagaaacaaattgtacattctagatgggatatgggagacttgcatgatgatttcaccatggatggtttatatgcatggggatttgaccaagtatatatagaaaaaaaatgaattttcatcaaataagagttgatggcttgaggttcagcaattatccaccattagagatgacaggtactttcactaaggtagagatggaaaatctctatagaagcacatcacaaataatcaccccttaccaaacacttgtagagttgtaggacacaacaacaatgcaaaaaacttcgatttttcatttcctagtccaaggaccacataaaaaaacctgcagttgatagcatagagccaaagtatgcacactcctagagttaaattggctggcacaaaggactgctatttctagaaatctgacaaccaatttacggaacaaatatcttcacggaattaagtccaccaaatgggtgaaaactttaatcccgaataagattggaaaagggcatcgacatgttctgcaaatatttttttctctagtttccatatctgtccaacaaactaattttacaaaataaagaagagcctacttttgacgtgctctaccttgttgttggtgacaagccacaaactgctgagatgctaaactaaccttatacttacagctttctgctttatccacttgcaactataagtataaaatagcgcaaccagagaattagtgaataatattcaagaaaccattgtgacaaaaagaatcatcattgttgttgcagacttgcagtataaactttgaactccccgaaggctatggaagtgagcaattacaacaggaggtatagtaccattttatccccaacactcacatgctcttttctagctgttcagacgctgtagactaatcatcaagattttgacaatcatcaaacttcgaacaaagtgcaaatatttcatcaatcaaatttgtaaaaaaaataaaagaaaagtgtttatcatttaccatgatatcgacgaatcggtcagtagttggctctggttcaacattagcccctgcaattgagagggataacttgcttccagcaatcagaggcacctgcatctgcatatcaaataaaaaggtacaaaatcattgagttgttgaacagcaaactgcagtagtgcaccactaacatcattcatcgagtacatgggagcatatttctttccattttcttctgggtttactccctttgcaatggccttgatctttgaaaatgaagcatccgttgcaacatcacagtgagatgttgaaatccattagaactgcaccaaagccatagaatgtaaacttacagcaagtagtttgttaagacagcttccatcacagacggatccaagctacttaggtctgcaaaacaccaccaaaaattttgatgtccacacgaacacgcacatacagacatgaaaccccaatctcacacaagaaaccctcaagaaaaacaactttcatgcttcagactctcccgggcgatctcattccctgcttgcgccagggacacgagctgcggtttgcacctttgcaacagcaaaaaataatcaaaacacgcagccgcatcctttttaatctggagacattaaaaaatagattctgcatacagaagttcaaagtcattaagtaggtatagggattggagctcggcaaaactcggttcaattcagtccatggataatcctaagaagtacccaggagaagctgacccaagaaacttgatctatcattcacaacaaagactgccttttctgcccaaattgcagctagccgaggaataccatctagcagtcctaattttctgtcatgccgtaacaaaaagaatcagggctacactttcaaaccccccaaatcaatatatgcccctccccccatccaaaaaaaaaaaaatcctcactgaacagcacaaaatctgcagctctaaatatagtttaatgccaacccaacacaactcattattccaaatagaggctacatcagattcacataggagtaagtagcatttgcatgagaataaacagggaatctaaaggagagtaggatccaatacctcagtgaggtcttgaacgtagtatccgaaggaccagttcctaagcatcttgaagaaggtgtggtggtaattgttcttaccacgtcatgaggtcgttgtgctttccacagcacgcatggacttctgggccagttcgccaaccactcaaacaagtggcgaacctatgaaaaaaaaaaattacctggggtccactacatagtagttatctaattattcactactccctccgtcccacaatataagggattttgagtttttacatgcaacgtttgaccactcgtcttatttaattttttttttgcaagtataaaaaacaaaaagttgtgcttaaaatactgtagataataaagtgagtcacaaataaaataaataataattttaaaaatttttgaataagacgagtagtcaaacgttgaaagcaaaaaactcaaaatcccttatattatgggacggagggagtagtatactaatcaaaatagcataaattagttagaatttaacaattttacccggtgtcctgtgacactggtaagttgtatgtgggcacgccactgactctaacgacaccgaatttgttatatatttatcgacaaattttccttcaaaaatttgatagatataattacagtataatcgtagtgtaattatactgtaactataatgtaacttgtatatatgtaactttcaaaaatctctccgtaacatgttatttcggtaaaatggaagtcgtgggaacaaatcttttcacatatatgtgtgctgtgatttttttcttcctcactagaacaattcaaaattacgtgaaacttacatacaagttacactgtatttacattcaagttacagtgtaattacatacaagttataatgtaattacactacgattgtactataattatatctgtcaaatttttaggagaaaatatgtcgataaatatgtaggtggtcccggagaggagagaagatcacagtgtggattgtggaaagccagaaacgacggggaggcaaagggcagatggcgtggaacctgaattgagattcctctaacttctcaataacttgtgtcactgacatgtggaccatctatccaatgggtccgcatgttagtgactcaaagtcagaggatccccgatcacgtgatttcaggatggggatctcccacgcgagaaagagagaaacgatctggagtgttgtatagatctgaaccgttaagtgatgaatgtaagagtgtaagaatgaaagatgagtaaattgagttggagtattatagtaaggtagggtagatagaagaggaagatagatagatagatacatgtagtcaagataaatttacggatgaaagagggaaaaacttagatatgcaaaaaaaaaaaaatgttaagagcaatgagtacaaaacagtagtactgtctctagaaaaaaaaatcaaattcagagatattaaaagaaaccgaagggtaatgttagtttgctctttgttgacgataacttgaggctagaggttctggcagcatcaatgatgctctggtagcaactgtaccatggaacatacgattggtagaaacagaagcagggcctggagaaatggagatgacaagcaaactgcaaaaataaccatttcaaatgtgctatcgatggtgttttttctatatatttcctgaaacaatcatccaaccgtttttgcttcactggtggagaaaccatctttcgtcggtcggctgaattccacaatagtctcggatgcaataaaaaccagggctaaagataatctttagtcccggttaaaaagggtaacgggcatatttgatctttagtcccggtagatcatctttagtcccggttcaaatgctgtcagggcctgtcaggcccccaccaaccgggactaaagatcgtaactttagtcccggttggtaataccaaccgggactaaggatctcggggatctttagccctggttggtaacaccaaccgggactaaagtctcacccctatatatatgtcttcttcctcgtccagctgcccgagcaaacttcaaaatttcttcaaaaaagaggggaggtcatgccaaaatttctagtgaatttattttggtgattacatacaaatcggaggtgcctaaaaggtttgcaacttcatcctccaatgttttttttgtcatattacatttgcagctatgttttgcacacttttttgtctccaaaatttagttgtaagttgatgagagagaaaatttgtgtggggaagaaataatatatagaaatttagttgatttgctaaagaaggttttataaaatagttgagaaagaaaatatagtgaaagttaatcttaaataatagaaaacaaactaaaatgaaaattaaaagaagtaaaacacattaaaatttgtttaaaactttagaaatagtaaataagaattatttggtgtaatattttatgatttttgtatgaataaagatatgtcattattgtataactgttgaaagagtttgtaattatcttataattattgtatgactgtcattattgtaagaataattatttgtgtacgattttttttcgactcatgtagatggatcggcaatggatgtacgctgaccggcggtccaaagagtttattgacggcgcgcactattttttgagagtggccgaagctaacaggcaaaggggttttatttgttgtccatgcaataagtgtaagaatcagaaggagtattctgcatccaggactattcatttccacttgtttgagtcggggttcaggccaagctataattgttggacatcccacggagagcaaggtgttgaaatggaagaagatgaagtggaagacgacaatattccggactttgctcagtacgttggatttggaggaaatcaaacgggcgaggaggaaagggatgcggatggtaacgacgttgcggatgatcttggtcagatgttataggacgccaaggaggactgcgaaagtgaaaagggggcccataaattggacaagatgttagaggaccatagaacgtcgttgtacccaggttgcgagcaggggcacaaaaagttggataccactctggagttcttgcaatggaaggcaaaaaatggggttagtgacaaggcatttggtgatttattgaaactcgtcaagaacattcttccggagggaaacaaattgcccgagacaacgtacaaggctaagaagatagtctgcccgctaggactggaagttcagaagattcacgcatgtctgaatgattgtatcctatatcgcggtgaggagtacgagaacctagaagcatgccctgtttgcaaagcactacgatacaagattagacgagacgatccaagagaagttgacgggcagctaacaaagaagagaattcctgctaaggtgatgtggtatttccctataataccacggctaaggcgtttgttcaggaacaaggggaatgctagaatgatgcgatggcacgctgaagagcgtcaacaggacgggatgctgagacaccccgccgatggttcgcagtggcgaaacatcgacagaaaatttaaagaatttggaaaggacgcacgaaacatacggtttggtttgagtacggatggcatgaatccttttggagagatgagcagcggccatagcacttggcccgttacgatgtgtatctacaacctccccctggctatgcatgaagaggaagtacataatgatgccgattattattcaaggccccaagcaacccggtaacgacatcgatgtgtacctaagaccactggtcgaagatcttaaactgttgtggaagaaggaaggtgtccccgtgtgggacgaggacaaacaggaggagtttaacttacgagcgctgctgttcgtaaccatcaacgattggcctgcacttagcaacctatccggacagtccaacaaggtgtacaaggcttgcactcactgtatggatgaaacagaaagtacgtatcttaagcactgtaggaaggttgtatacatgggtcatcatcgattccttgcagcaaaccacccggtacggaagaaaggcaagcacttcgaacataaggttgaccaccgtacgaagcctaaacatcgcagcgggaaaacagtgtttgctatggttaaagatcttaaagtagtgttcggaaaggggcctggaagccagcctatagagagcgaagatggtcacacggcgatgtggaaaaagaactctatattttgggagttaccctattgggaattcttgaacgtccgccacgcaatcgacgtgatgcacctcactaagaacctttgcgtaaacattcttggcttcctaggtgtatacggaaagtcgaaagatacactggaagcacgtaatgatctgaagcatatgaaacaacgcggcgaccttcacccggaaccaaaggagaaaggaagccattacttgcgtccagccagctacactcttagcaaggcagagaaggaaagtatgtttgaatgcttggagagcataaaggtaccgtctggatactccacgaatatcaagcgaataataagcacgaaggagaagaagttcacaaatctaaagtctcatgactgtcacgtgttgatgacacaactgctaccagttgtaataaggggtatccttccagacaatgtccgggcaacaataacaaagctatgtgcattcatgaacgcaatttcgcagaaggtcatcgatccggatagattagaagcccttcagaatgatgtggtgcaatgtctcgtcagttttgagttgatatttccaccttcatttttcaatataatgacacatctgctttgtcaccttgtcaaagagatcagtattctcgggcctgtgtacctacacaacatgtttcctttcgagaggtacatgggcgttctgaagaagtatgtttgtaaccgtgctcatccagagacaagcatcgccaagggatatggaacagaggaggtcatcgaattttccgtagaatttatcgaagaccatcgcccaatcggggtacctgaatcacgccatgaagggagactacgggaaaagggaactctcggaaggaaagcaataatgacggtagacaacaatttattccgtaaagcccatttcacggttctgcaacaatcttcattggtagctccttacattgaggagcacttggctctagttcacgccaggaacatcggtaagtccgatgcatggattacacggcatcacattgatactttccccgcatggctacgataacatctcatgggtaacgagtcgatcaaccaacaacttgccttcctggcgaggggaccgtctgggtcgatcgcgacattccagggatatgagatcaatgggtacacattctacacgagagccaaaacagtgctgttcgtgtcgatgccatgggacacgatggaacaactggcacgtattacggtgccatcgaggacatatgggaacttgactatggtcctctcaaggtccctctgttccggtgccaatgggttaggttgactggtggaggcgtaatgattgatgacagtgggatgacaacggttgaccttaacaaggttggatactcggacgaaccttttgtcgttgcgaatgatgtaacgcaagtcttttacgtgaaggacatgtctagcaaaggaaagaagggcagagggcctgacgagcctaagcgtcacgtggttctcccaggcaaaagaaaaatcgtcggagttgaggacaagacaacaataatttttcgaagtaattgtcattaatctttgtactttaaataattttaatgcattattttctattttagaagcacatatgtaatggaaaataatattcagtgcgcttatcagtagtcccagttcttaaccctaaccgggtttaaaaagaatttggaaatagcgggaaaatatctttactcccggttgatgagaataaccggaagtaaagaaaagaaaatatcttttctttagtcccggttgttctcaacaaccgggagtaaagatatctttactcccggttattctcatcaaccaggactaaagatctaggggtatatatattcccgatgcgcgccctcatcttctccaccaacacttagaagtttttgcccgatcgatctctctcggcttctccttcgccgccattgcctagggcatccccgcgccgacgccgccgccgtatctcgccgtcgtctcgcgctcgtcgtcgtcgccgccgcctccgcctcctccgccgccgctgcatctctggggtgagagccgccgccgtctccctctcatcagctatctctctccgatctcaatctctctctctccctctcggttgccgccggccgcctcgttgccgacgccgacaccgacgtcgtcacgacacgacgccgcggcggcacaacacgagacgagatgccacgacgccgccgcggcacggcaccggtgtcgcgccgccacgccgccgccacgcaacgccgccgccgcgcaacgccgccaccgggccgcgcgccacgccgcccccgcgccgcgcgccgcaagccgccgccacgccacgccgatgccgcgtgcggcgccacgccgccgccgcgccgccccgccgccgcgaacgaacgtgaacgagaacgtgaacgagcgaacgaacgtgtacgagaattaaacgtgaaagaacgaacaaacgtgaacgaacgagcgtgaacgaacgtcaacgaacgtgaacgtgaacgaacgtgaactaatgaacgtgaacgtgaacgaacgtgaacgtgaaatgcaatataggcaggtgaatgaacgtgaacgaacgaacgtaggtgaatgaaacatgaccttaacgagaacacgaacgtgaacgaccgtgaacaaaacgtgaacgtcaaatgcaatatattttacttcgcgtttatcctaatacatctttttgtatcttgcagaaaagacgttgtcggagtcgtccctcaagccggagtggtagctagccctcgaaggaattcgcgcaggcaagtgacataattatatatatgattgttatatttgtaatgcaattaagactattagatttaatatacgacacttagacttagcatatatcactatttgagtttcagtataagattattagatttgtaattagactttgcatataagattgtgtagggttctaatatacgacagttacacttagcatacatgactatttgagttttagtataagattatttgagttttaatataagattattatatttgtaattagacttagtatataattattgactagctagggtcctataatatatgtctcctagacttagcatttatcactatttgagttttagtataagattatttgagttttaatataagattattatatttgtaattatacttagtatataattattgactagctagggtcctataatatacgtcacctaaacttagcatttatcactatttgagttttaatataagattattagatttgtaattagacttactatataatttattgactagctagggtcctataatatacgtcacctagacttagcatatgattgttagcatataagattgttaaaacataaatgtctcatgacttagcagatgtttcctgtatgaacagatggctgattgtgatgaggaacatatattgtacgatacaatcgcggagggaagcagccagtactggaacgaagaagaggggaacgaggatccaaaccagtatttgaacgaggaagggaacgtggagagggatgcggaggggaaccaggaggggcacgtgaaaagggatgtggaggggaaccaggaggaggaggctagtggaagtcaaccctccgttggacagaagagggcacgcgggcaacgaggtgccgcgaagaagcttgagggtcggcacatcataacggaagtgaatgaagacggccgacctagtgccccggcagaagccgccaagaactatgtacgtcacagcggttgggttgtgcgggataacgtgcctgtcagtacggtgtactggcgcagaacaagggcacgcggagatcatgagagctttgtcccagattcggagaaagagatgctgtggactacaatgctcgagacattcacccttcccgcgggtacagaggacaaagtgaaaaggtggactctgaagaaaatggcagaacagtttcagagcttcaagggagatctgtaccagaaatatatcctgaaggggcagacaccgaacttcgacacattcccaaagctaagggatcactgggacgagtttgttgcatataagacaggtgaacaagggcaggcgatgatggaaagaaacaaagaaaatgccgccaagaagaagtaccatcaccacttggggtcaggcggctataccgtcgcgatgcctaagtgggaggagatggaggctagcttgcttgagaggggtatcgaaccggccaccagtaattggccggaacgatcgaagttctggtactatgctcacggtggaacgctcaacccagctgatggctccctggtcttcggtgatcagatacgcgaggctgcgcatcgactaacagacgcagtggaagcctcttctcagggcacgttccgaccggacagagagaagaacgagttgtcactcgccctgcagactccagagcatccaggacgaacacgagggaaaggggtgattccttggaagattgggttcaaggagggcatccacacgtacaggagtcagatgaggagcaagagagataccgaggcgaagattgcagatctagagttcagggtatcgagctacaagctcagcatgcaagaggaggtggcaaggaaggttgatgaacgcatggccgcacatcggtcccatgatcccaagctgaccattcctcctgcaatggtgagcccgtcaggaaaccatagcagctgcgcctcaacggggcaggtaggatcatagagcatggacgccatgcaaacccaggacgaatccacctgccccgttgatgacatcactcagcgaacaccatgtgagctgcatattcctttcaagaacttatcaataaaggtaagctcgtagtttatagattttagattttgccattccgctagttgctgcttatatatgttgattactaataaataacctctcacgacatgaaggtggcgtcgggcatggccatcccaacggacccttcaggtacttaccactgcaggccgattccagcaggatactccaaggtcgaagttaagttggtcgaaggtgcgtacgaggacctcgagctggattaccctggaggagatggtgagacgcatctacgagacacaagtcacgccattattctatggcgcaagcggtacatcatcctccctgggcgacaagcggcgtctcgtgcaccatctcctccggcttcgccatctcctcctcaggctcctccaccgtctcctcctcatgctccagcaccgtctccaccttaggctcctgcaccgactcctcctcaggctcctgcaccgactcctcctcaggctcctacaccaactcctccgcaagctcctcttccggcaccttccaagtcaagggccccccaagctccaccgcctgcccccacaagggcaacgaagaaggcgaaagttgacgccaccaagaacaaggacccggggtacgattgcacgcaagaggagcttgaagcttacgtggcatcagaagtcaagagacaattcaagcctcgaagtccagaaaagaagattcctatagacccgagtgtcaggaacttcttcaggggtatgtctgcacctgccaaggaggccataaagctatcggactatgagcgaacgctcaagaaagcatcttctggaaagtccaaaccagtccctcagcttggagagcaaccaaaccaggagatcgagccgttggtgaccggtaaagattttggaatacaagaatttattaatgacaccgggctaactacggatcaattgctaggagacgcaccaatcgaaaaggcggaagtgaaatacatgtacgaactcggtaaaccgcttgtcaagcctgagctgctgcagtccctacccacacaaatatacaagttccatcagctgtacatggagatgagcgccaccggtagagagatgatcggagcgagggtcagggacacggacttcttgcaaggagatgacattctctagatcaatttcaagggaatctacgaaatataccagctggacgccctcgacgtctctattatgagttgctggattttgtaagtatatcgttcagttagatttcttactacgtctcctttaagtaattaggtccttttatataagtagactatatataatatatactcccttttatcgttatagaatggagattcaaagggctcaacggcggggggttttcgatactggattcatcgaccctcggaaagtaaacgtcgcaatgctcgaccaatatccgcaagccacagaggacaatctcgtccatctcctgaaggcgcagcattacaagacgttcatactgttgccgtacaacacagagttagtttaattttactgtcttcctataccaaatttcattctcgtacgaacttgctaagtgtttcatatgtaatgcatcccacgcactttgcagattccactgggtgcttttactcttcgacctggaggcctgcaccgtcaacgtatatgactcaatggataaaaaagagtctacgtttgacaaggttttcgaacttatagacacgtactgtcataagttcctatgttaattaagaaaatcttgttatattaattgctactacgaatcatagctttaaactccatgtagggcttggtatcggttccgtcatttggtccgcggcaactggagagaaagacttaggcggaagttcaaattttctgtgagtacacatgctctatatttatatttctccgattcaaatacatacaagtgtatattaattagatctctcatcgtttgtcatttatttatagtgcgcaaagcaaaagcagggaactaactagtgtagctactacgtgtgcgagtattgccactgccttgcagaccaaatcatcaccacaagagagctcgatgtacgtataaataaattcaaaatttcattacgtatcgatttgttgttaaattactaatcaatttcatacattcatatagtttattcgcatgagggataacctgatcacacacaaggaatttatcgcggcggttcaagaacatctcataggattcatcaacgaacaaatccttgatcccaagggtgaattctactacgacggaaacacaattcataggtccttagtttctaagctagcgactactactacgtcgaaatcgtagctagctaggacatataatggattgtaattaatacatgactatgtttctatatgcatgtgtacacattttctataatgtaaatatatattttggtcatatatatatataatgcataacatatatatgtataaatacatatatattatgcatgtacatatgtattgaaacatatataaatataatattatatatatatatatatgcatatattattgacggagctggtggctcctcaccgggagaccgcgcaggcccccctttgccagttcggccgggggcttagggtgaaatctcaagctctcgctctctctctgtatgtggaaatatcgtccgccagccagaaacacgagacaccggcgatctatacaggttcgggccgctgagaagcgtaataccctactcctgtgttttggtggatctgtgtatgaatgggctacaagtgtgagctgacttctcccccgttctaagctcacaatctggaaaagaatcaagaaaaaaccccttctctatgggcaaggtcctccttttatacttcaaggggataccacacgcacccttctctttccaaactggactgttctttttctcttgaacgggcggagatcagcacggttgctgtccgaatgacgctccgatgggacagcccacgcctacctccacttccgccgggggtgagcgcgtcgtgggagcatggctgtgcgctgacgatatgatcagtgtcagaccggtcacaaatcggtcattcttgtccaccgcgtgtaatcttggcaacgtgcatgtttgcccttcttcactcaacatctcgcctgtaatggttaggatgaagcctggcatatatcgtccggggctaacgtgtcatctctaatagataacgcgcctaactccggcttgagacgagtgcctagaggctttcgtcttgacgggacggggcaaggcgtgcgtcagaccgccagtcgccacctaacccgtgatctgaccggtctgtgactggtcacagaccggataaaggaacgcgccatactgcgctgcatgcagcgtgacacgcttgaccagactgcaataaatgctgttaggtgagcacagctgtgctcacttatcccatatatgtcgcgcagacttccttaaggggtcggggtgcctcggccctcggggccggggcaagcgcaacccgaccccccctcgggggaaatcaggaggagggcggacacctcaccctcgggcccgacgtccccgaaggtgccaggccacgtgggcggttgcgtctgcctcaagcctctggtcatgatactcccggtcccatatcaccgacagtagcccccggcgttatgccagagcaatttcccttcccaagggaagcggtcaggtgtgacgccaccctgtgacaggtgggaccggtttccgtagttgggcaaaatacccaacggtctcaattcacgcacattggtattggtaactttggttgtccataatgggcggtctattcaagactgccacaccacttgagcagcgcgcgaatctgggtgagcagatttgtctcgcccggagatacggtaacgccgcttcggttggcgagcgtaattaacgcgcgcacgatacaatccgtttcgattgccacaactgcacatccacttcaagcgccgtaagcgggcgaatgggattagtggaagcgtgggcacgggaaacgagggagcgagatagcgagatacgagggagcgaggtagtgggcgcgagaaacgaggagccaggcccagcgatggcaagggtataaaagcatcgagaaaaggatttgctcccttcctttcgccattgttcctcttgccttcgctgcctgagctctaactctttctctgccacgccctactttcgccacacgcgctcgttcccaatcatctcttcctccaccgccatggcacggggctctgctctgctcgacggcagtgtactgccgccttcccgcatcgtgaatgagaggcacgccggactgccgcgccgcttcatgccggagtccgccaccggtcgggagatagtgatgctgggcgaggggcgcccggcaccagactacccggggcggtccatcttcttcctccccttcgcaatggctgggctggtcccgccattttctcatttcttcatggatgtcctggagttctacgatctccagatggcgcacctcacccccaatgcggtgatgacattggccatcttcgcacacctgtgcgagatgttcattggggtgcgcccctctcttcagctgttccggtggttcttcaccgtgcagtcggtgtcaccgccatcggtggttggcggctgctacttccagccgcgggggtcggtgttgaaccgctacatcccctgcgtcctccgcaagaagtgggacgactggaagagcgactggttctacacccccctcgccgacgaagcgcgcctccgccttccaagccagcccccggcgcaggtctccagctggcgggcgccggcagatctgggggaggagtacgacgccgtcctcgaccgcctggcgggcctgcgatcccaggggctcaccggggccatggtgtacggcgattacctccgtcgccggattgcgccgctccaacggcgcgcccggagcgcttgggagtacactgggcctgaagattacatgcggacccatcagggaaccagatgggattgggctcctgaggacttcaagatcgtagtccaaagggtgcttaatcttagctccgcggaggcgtctcgccttcctcaggagatcctccccctctgcatcgatcccgaccgcgtctccattctatccattatgctgggggttggggcctcagaggagagagcccctaagagccacgatggcgcgggcgagagccgccgggggaaacgatctgccccaggagggggtcgtgcttctgggccccgcgtcgggggctcggggagcagccgtcctgccgacgccccggggaagaggaagctgggaggaacacctcccccatctcctccccgagggggcggggcggtgcgtaccagcggtcagcgcccggagggggccgcgccgacgtcacagcccgagggggagcgcaagaagaagcgcctccgcaagatgggggagacggaaccagcccggggaaacttaatttcccctccaaggtggtcattcaaccgaccccctcgcaggttcgtctcactctcattgcaaccatctttctccaaaaagaagtttttttcttgctcattttgttcgccttctggttttttcttctgcttcagcgatgtcccgtcgcattcctcccgccaccccaagtccggccagtccgaggccgaagatccagcggccgcagaggagcggaggcgggagtctgaccggcgtgaagccgcagcccgccttcgggaagctgaagaggccgcccgggaggccgcccgggttcgccaagcggaggaagctgctcgggaggaggccgcccgggcccgccaagccgcagaagctgcccgggaggaggccgcccgggctcgccaggctgaggcgacagcgtcacttgggcccactccctcgggcggccctcaggcgacatcctccgaggcggctcgcgacgaggccgcgggcgcatcgcctgggcctacctcaccgggcgacgcccaggaccgaacgggcccgggggacatccccgagctcagcgtatcctccggggggccaagccgcgtcgccttttctccaaggcggcttttttcctcatcttccgtcgccccggtgagcgccgagcccattatgcaggccttggccgccgcaaacaccgcggtgctggatgggttcaacacccaggtggaggccctgcgtgcagaacgagcggagctcgaggccgcatgggcgcgcgtcgaggaggggcggcgctcggtggacgccatggtggaggtgggccgtaaggcccatcgccgccacatctcggagctcgaagcccgcaaggcggcgctggcggagatcgcccgagaggtggaggaggagcgagaggccgccctcgtcgccaccaccgcgatggtcgaggcgcaagacaccctccgtcttcagcacgcaagctgggaggcggagctgaagagcaagctcgacgccgcccaaggggttctcgactccgccgccgcccgagagcggcgggcaacggaagccgaagcggcgtcccggcggcgcgaggaggcccttgaggcccgtgccatggcgctggaagaacatgccggcgccgtggagaggggcttgatggaccgcgaggccgccactgctctccgggaggcgacgctggtggcgcacgaggccgcctgcgccgaggaggagtccgcgctccgccttcgcgaggatgcactcgccgagcgggagcgggctctcgaggaggccgaggccacgacgcgacggctggcggacagcctctccctccgcgaggcggcgcaagaggagcaggcgcgccgcaaccttgaaagcgtccgtgccgagagagccgcgctggagcagcgggctgccaacctcgaggcacgggagaaagagctggccgcgggggcgcgcatcggtggggcggctgcgggcgaaagcgacttagccgctcgcctcgcggctgccgaacacaccgtcgctgacatgcagcgcgcgctggactcctccactggggaggccgaggcccttcgcttggcgggcgagattgggcccggcatgctttgggacgcggtctcccgcatgaagcgcgccggtcggcaagcaggcctctggggaggccagacgacggtgccccccaccaatctggaaggcctcgctccgcacctcaacaggatggcctgggttctcgaacgactccccgaggagcttgagaagaccattaaggcatcctcgagggacctcgcccggggggcggtcgaactcgtgctggcaagttaccaggcccgggatcccaacttctccccatggatggcgctggaggagttccctcccgggaccgaggacgaggcgcgcgcgcgggtcggggatgctgctgaccacatcgtcaacggcttcgagggctcggcccctcggctcgcgttcgcccccagctccgacgaggaaggcgacaccagcagcgaggacggcggtggcgacgaggccggcgacccgggcgcatatgaatgagcccccaggcccccgccactcttaacttttttcttgttctttcttctaaggccttcatgcctcttttttgtacaatctaacttaatctgcaatgagaaatgatgaaaaatttttgtgttagttttattttgctatatatatgagttgaggatgatctgtgccatggtccttttgcgccttagcttgaaataagggctcgcgcccaagtcccggtcctcgaatggctcgggtcggggctagtgcctggggagatccacatgtcgagactggccaggccgggaacgtggtgaccgaggggtatgggtgacccgattgtgggtttttgccgattcccccccggagttcaccacgccccggggcacggctcggttctgggccccgtttggcgattttagccgaccgaaccgagcccccgagggcaaggttgagtacgagtgacattatttcaagtcaagattcttcaaaaggaaaaaaacggcacagacacaacctttaggaaattgaaactgcttttattgaaatgctgaaaggaatatatgtgcatgtgtggtagcccccggctaaccctgcacacccgagggggggtgcggggttagcccgagccgaaacctgacacccgaccccccccttcaggggtagaagcgacgaaggtgttcgatgttccacgggtttggcagctccgtgccgtcgcccgtggccagccgtaccgagcccggccgggggacaccgatcactcgatacggaccctcccacattggtgagagtttgctcaatccagcacgcgtttggacgcggcgtaggacgaggtcgtcgacgcagagtgatcgggcccggacgtggcgctgatggtagcgccgcaggctctgctggtagcgcgcagctcggagggccgcgcgccgccttcgctcttccaagtagtcgaggtcatctctacgaagctgatcttgatcagcctcgcagtacatggtggcccgaggagacctcagggtgagctcagatgggagaaccgcttctgcgccgtagacgaggaagaaaggcgtttccccggtcgctcggcttggtgtggttcggttcgcccagagcaccgctggcaactcctcgatccatgaatcgccgtgcttcttgagaatattgaaggtcttggttttaaggcctttgaggatttctgcattggcgcgctccacttggccattgcttctggggtgggcaggtgaggcgaagcagagcttgatgcccatgtcttcacagtagtcgccgaagagttcactagtgaattgggtgccattatccgtaataatacggttaggtactccaaaacgggccgtgatacccttaatgaatttaagagcagagtgcttatcgatcttgacaaccggataagcctcgggccacttagtgaacttgtcgatcgcaacatacagatactcaaacccgcctggggcccgtttgaacggtcccaggatatcaagcccccagacagcaaatggccacgacagcggtatgatctgcagggcctgggccggctgatggatttgcttggcgtggaactgacacgctctgcatcgccggaccagatcgactgcgtcattgagagctgtcggccaataaaatccttgacgaaaggccttgccaaccagggtgcgcgaggcggaatgggctccgcactcgccctcatggatgtcaacaagaagctcaacgccttgttcctgaggaatgcacttcaggaggattccgttagccgcgcgccgatagagggtcccttctaccagcacatagcgtttggaaatgcgttgtacgcgttcactcccttcgcggtcctcaggtagagtcttatctgtgaggtatgtttggatctcagagatccaagcaatcaatctaagggagcttggaacgctctcttcgggtcccgaggcctggactccgacgggcctcgggtgccggtcaggcgcatccgtctcccctgaggggtcgggtcgcgccgacggctgggtaagcctttcttcaaaggcgcccggtggggtctgggctcgcgaggacgcgagccttgagagttcgtcggctatcatgttgtcccttctgggtacatgccgaagctctatcccgtcgaaatggcgctccatacgccgcacttggcgtacgtaggcgtccatctgtgggtcagagcaccggtactccttacagacctggttaacgactagctgggagtcgcctaataccaagaggcggcggatccccagtccagccgccactctgagtccggcaaggagtccctcgtactctgccatattgttagtcgctcggaagttgagacggaccaaatatctgaggacgtctccgttcggagaggtcaacgtgacccctgcaccggcgccctgaagagacagagaaccgtcaaactgcatcacccagtgggcggtttgaggcagctgtgaggggttcgtgctggcctcgggtattgagacggtctctggagccggggtccactctgccacaaaatcggcgagggcctggctcttgatagcgtggcgtggttcaaagtgcagatcgaactcggaaagctcgattgcccattttaccactcgtcctgtaccctctcgattatgcaagatttgaccgagggggtaagacgtaaccacagcgacccgatgcgcctggaaataatggcgcagtttcctcgaggccatcagaatagcgtaaagcatcttctgggcctgtgggtatcgggtcttggcgtcccggagggcctcactaacaaagtagacaggccgctgcacctttcggcgaggccgatcttcttcgctaggggccgcacccccggggcgttcttcgtccgagtggcccctcggggcgcacccgtcttctgtgccgatgacctcggggtcggaagacgacaggagcggccttcccacagtggcctcgggaccgtcctgggggttgggggctcctggtgtcatcggacaagcgggcaaagggccaactccggtcgtcaggggccttaggccaccgttcggctcgggggcctcttctccctgctctctcccgggtcgaatcggtacagggttagcctcggggtcagagggtgataggtgcggcctccccgcagtggcctcggggccttcctgagggtcgggggcacccgacaccgtctgacaagcgggcggagggccgactccggtcgtcgggggccttaggccaccgttcgactcgggggcctctcctccctgcctgctcccgggccaagtcggcacagagtgggggtgcgcagaatgaggattgtcctcatcgcgctccacaaccaacgctgcactaactacttggggggtcgctgctaaataaagtagcaggggctcatttggctccggggcgactagaaccggaggagagctgagatatgcctttaactgagtaagggcatgttcagcttcctccgtccaagtgaacggccccgagcgcttgaggagcttaaacaagggtagcgccttctctcccagccttgatatgaaacgacttagggcggccatgcaaccggtgacgcattgcacgtccctaagtttgctgggggggcgcatccgctcgatagctcgaatcttctcggggttggcctcaatgcctcgggcagagaccaagaacccgagaagcttgcccgcaggtacaccaaacacacacttatcggggttcagttttatgcgggcggagcggagattctcaaaagtttccgctagatctgaaagtaaagtttcttggttgcacgtttttacaaccaagtcatcgacatacgcctcaacattacgtcctatttggctacccaaagaaattcgagtagtacgctgaaaagtaggacctgcattctttaacccgaagggcattgatgtataacaataggttcctacgggggtaatgaacgcagttttttcctcatcctccctagccatgcgaatctgatggtaaccagagtatgcatctagaaaacacaaaaggtcgcaccccgcagtggagtcgacgatctgatctatgcgaggcagggggtaaggatccttaggacatgccttgttaaggtcggtgtagtcgatgcacatccgaagcttgccgttcgccttgggaacgaccaccgggttcgccagccactccggatggatgacctcacggatgaacccggcctccaaaagtctagccacctcctcgcggatgaaggcttgacgttccggggcttgccgccgcactttctgccggaccggccttgcgcccggccgcacggcgagacggtgctcaatcacctccctggggaccccgggcatgtccgctggtctccatgcgaagacgtcagcgtttgcccgcaggaaggagacgagcgcgtcttcctatttgccatccagaagaccaccgatccgtgtggtcttggatgggccgtcgcccaaggcaacctccttgaccggaacctcatcgcatgtggccatccgctgcctcggggcggtgggggcagaggggccaagcctctcgtcaccaccctcgggcttggacgcagcagcgaggcggtccgcgcgctgctccatgcaagcaagcgcgactttaaggtcgccacggacagagatggggccaccggggcccggcatcttcatccggaggtaggcgtagtggaccgccgccatgaacttcaccaacgcgggtctccccaggaccgcgttgtagggcagactgaggtccgccacatcaaagctcacccgctccgtgcggaagttggcgggtccaccgaaggtgaccggtaggtcgatgtgacctaatggccacgtgtgccccggcgtcacaccgatgatcggttgagacggctggagcaccatccccggggccttgatagcatcaaaggccgcgggggaaaggatgttgagagccgctcctccatctatgaggacacgtcccaacttcacgttgcagatggtgggggagaccaccatcgcaacctgccctccccgggcaatgcacggtgggtggtcggtctggtcaaaagtgagagcaacctccgaccaccgcgcccgacgcatcacctcatgggtaggggccatggccagaagctctcgcttcatagccttgaagctccggcgagagacgtgagcacacgcccctccatcgacggtggcaatggtggccccaggttcttggaaacctaggtcatcatcaccatcatcaatgtcaacagcgggggccttctgcttggcctcacttcgccgtttgccggatgggaccgccggggacttgccctcgcggcgttcctgcctcctgtcctcctcccacttcctcgttcgctcagccaaatttttgactgcgcgacagtccgcgagatcgtggagggaggtgttgtggacggagcaccacctgccggcggggcgctccctgctgggtgtaccagccccgttctttttgtcgctcgcaggcctcccctttcgagtggcccgcggagcgccctcgacggcgaggacatgaccctcgtcgccggaacggtccggcctcttcttcctcctcctgtcacgccgccctgtctgagcggcggatccgggggcggccgaagctgccactccggaaccggaggagttccaggtccacgcttcctccttacgagccactcggtccgcgagctgaaaaagctccgcggtagtctggggctctttggaagcgatcttttcgagcatgcggttgtgccgcacgccccccctgaacgcgtagatcaccgcgtgtgcagggatgcatggtatagtgttgcggacttggcaaaaccgctgaatgtacgagcgaagcgactcatcatcgcctcgctgtactgcatgcaagtccgcttcttcgcctgggcgcggatatgtgccttggaagttcatggtgaactgttggcacaaatcttcccaggagtggaccgacgcgggtggcagattcattagccaaccccgcgcctgtccttttagggccatgggaaagaagttcgccatgactctgtcgtcacccccagcggcctcaatcccggtcgtatagacctggagaaactcggtggggttgacactcccatcatacttctcggtgatggtgggccggaaccttgggggccaacggacattccgaagactcgccacaaaggctctacagccaacaccaccggccgggggcacggagggctgatcttcacgtccatgtcgaggtgacactctggacgaggaggctccctccgttgcacggggagtacgccggctattacgccggcgcccgatgttgaggcgggcatccggctccccatgctgatcctcccgagtcgacggtgtagacgagggagtggcagccgaatgacgtgcagccgccgccgctcgccgcgccctccgccttgatgacacggagccggtggtagcggcgccggaggtcttggtggtggtggcggaccgtccaccagcacccaggcgctgctgtgccgtcatgaccaagttggccacgtcttccagccatcgttgggctggagactccgggtcatggacgacaggcgggtgtcgtaggagcgcgccagcagcctgaagcgcaccctgaggtgtgctgccgtcgccgtagacgaggaggcgacgctccccatctcgccgttctcctgcatcacctgcggctggtgacgccgcggatttgtcgaccctctcaagcgcctccccctgcttagggctttggcgcggaggaggtggaggagtacgagctcgacggcgcggattcggctccccgtcgtcgccgctcacactcggcgagaggtcgtgtgtttttccttgctcggccattaggctgaacaagaaaaacttggggcacacggaagagtctgagagctcagaaagcacacgctgagccccctacctggcgcgccagatgacggagctggtggctcctcaccgggagaccgcgcaggcccccctttgccagttcggccgggggcttagggtgaaatctcaagctctcgctctctctctgtatgtggaaatatcgtccgccagccagaaacacgagacaccggcgatctatacaggttcgggccgctgagaagcgtaataccctactcctgtgttttggtggatctgtgtatgaatgggctacaagtgtgagctgacttctcccccgttctaagctcacaatctggaaaagaatcaagaaaaaaccccttctctatgggcaaggtcctccttttatacttcaaggggataccacacgcacccttctctttccaaactggactgttctttttctcttgaacgggcggagatcagcacggttgctgtccgaatgacgctccgatgggacagcccacgcctacctccacttccgccgggggtgagcgcgtcgtgggagcatggctgtgcgctgacgatatgatcagtgtcagaccggtcacaaatcggtcattcttgtccaccgcgtgtaatcttggcaacgtgcatgtttgcccttcttcactcaacatctcgcctgtaatggttaggatgaagcctggcatatatcgtccggggctaacgtgtcatctctaatagataacgcgcctaactccggcttgagacgagtgcctagaggctttcgtcttgacgggacggggcaaggcgtgcgtcagaccgccagtcgccacctaacccgtgatctgaccggtctgtgactggtcacagaccggataaaggaacgcgccatactgcgctgcatgcagcgtgacacgcttgaccagactgcaataaatgctgttaggtgagcacagctgtgctcacttatcccatatatgtcgcgcagacttccttaaggggtcggggtgcctcggccctcggggccggggcaagcgcaacccgaccccccctcgggggaaatcaggaggagggcggacacctcaccctcgggcccgacgtccccgaaggtgccaggccacgtgggcggttgcgtctgcctcaagcctctggtcatgatactcccggtcccatatcaccgacaattatatatgcatatatatgtattgaaacatatatatgcatatatatataaaccatgcagcaacagggccatgaaaaaaaaaggtcagctcgatctttagtcccggttggtaacatcaaccggtagtaaagatggctcagccggccacgtggctaagccatctttagtcccggttggtaacaccaaccgggagatctttagtcccgattatttcacccggaactaaagatagcgatctttagtcccggattggtagtcccggtttggaaaccgggactaaagggggattacgaaccgggactacaaacgctttctccacagtgctttttgatagcaatcacaacgtcaaaatattcaacggatagagggaactattagcagtaaaatattattttgccagtacattgaataacgaaagacctaatcagttttattccagtagttccaaaaggcagcagagtctgtcacggacatactaacaggacaaagcgtcaaagcaggcataaagatgtttgattcagtcagaagaattcggaataggctatccaataaggatttaaacctttatacaaatttgacagtgggaaataatttccttggacagtaggactgcatgcattctgaatcatctaaacatacatcaatcgcattcaatcattttaactaataaatccataaatgtaggttgtttcatttttataattagtacaatgtcagtaaaacataatccagaaaacaatgtttgacatcaacctgacacttcatattccccaaataaccacacaacttgacaatatgggcaggaagatttcaattccaaaatcagcgttacacatctagccatgctaaacgacaacatatcattgtactaaacggcagaaacaaagtaaaatatgaataatgacagcattagacataaaactcgtcgacaacacttctccccactactacaaaaaggcaaatagatgtcgccactataggtgccggcacaccaaaaaccagcacctataatacctttcccgtccacgcgcccacccccacgcaccacatattcaaaaaccggcacctttatattcaaataggtgccggttttacggtttttaaataaaaccggcacctaaaacctgtgtcagagaaaggtgccggttctagacccaaaaccggcaccttttatattcaataggtgtcggtttttggtctagaactggcacctttattccgaaagtgcttttcatgcctcacacaaaggtgccggtttttgggtcgagaaccggcacctttcttccaatagtgcttttcatgtcccacataaaggtgtcggttttttatctagaaccggcacctttcctccaatagtgcttttcatgcccccacataaatgtgccggttgggaagacaattctttttagggataattctttttatctcttttgtgtccattgttggatgaaatgctaaatttgtgttaatgttttcttccatctacgtcatggccgttagtcaaattaatgctagtcaaactatgttaaggccacgaaaatatctattgatagcttgatttatctcaaatttatgttaggatgcccatcgatccgctagaggaggtggaagcggttttgctcgatttttcttaggttttggttgaagattgaagcctacaaggtaaaatgcactactcatttgtatggatctatcagccattcgtagatctgttctctagtgttatgctaaatttgaattaaggtgacgtgggtgtgtacaaaatcctcaattttatcgtagggtaaaatggtccttcctcgttgtttttattctaatgtgcttgtaaattatgaaatcttcattgttttttccttcacggtttgtaataaacgataataatcgcaggtacccattggatataatagatttagaatggataactacagcggatcgtgactctgtggagtatttcaggggagtaacggctctcgttgctgcggccaccagcacaaactcagtcgatgcaccggaatatatttggtgtccatgccatgattgcaagaaagacaaacaacttccggctcaacgggtccattcacatctccttacaaggggttttatggaaaacttccttagcgaggaggagcaaggtgagagaagtgatggcaactgtcatgggcatgatgcggatgtcggctgcgaggaggaggaccaaacatgtgtcgattagatgctgcgtgacggggagagatttgacactgatgatagggaatatcacaagttcacaaccagggtgaaggactccaaaactccagtttacaatggatgtaaggcggagcacagcaagctccaagtggtcctatcgctgcttcacctgaaggcgagcaacggatgttccaataagagcctcactgagcttttgcaaaaaagtccttcaatttttatgtaactagaaaaaatgctcgtgcgttgcaacgggtgaagtctattttaatcttattatttttatatggtttagttaagataaaattcactgtgggagttcgcttggatatatttatttttagaaaatcatgagatgcagttagaagtccgatcgtcttaagttagcatgcgagtttttttagcagatttcttgtatgattccttctgtattactaaaagtgaatgatctttaaaacctcaaatacagatatgtatttccaaaagcaaacaaacttaaaaatcgactcatacacagatgatgtaccaaaataccggcaaaaaacatctttaatttttataatagtagagattcgatctcagtcccaaagaacagtacctcagagacgctattttatgtagagacccttctaaaagccggatattccaaacaatggatagaaaaatagctactccctccgtccctaaatatttgacgtcattgaattttttaaacatgtttgaccgttcgtcttattcaaaaacttttgtgaaatatgtaaaactatatgtatacataaaagtatatttaacaatgaatcaaatgataggaaaataattaataattacttaaattttttaaataagacgaatgatcaaacatgtttaaaaaagtcaacggcatcgagtatttagggacggagggagtaattaggactgcgcttgaaaaagtgcaagtataggggctttttcgcaaatgacctccactaaccctagccagcgccgcccccttgtccctcttcctctcccgccgccgagagccgcgcgcgccgccgcctccgccgtccagagccgcgcacgccgccgcgcgccgccacccccatcgcccgccgccgccttcgtctcgcgccgccgcgcgccgccacctccgtcgccccccgccgccatcgtcgtccccgtcgcgccgccgcctccgcctcctcctcgcggcgccgcctcgcgctaccaccgtcggtcgccggcccccgccacgaccccttcgttagctaccggatccggcgccgtccgtctccaccgccgtcgtagaaagcccgtaggccacctgtgtcctcttgccgcccgatgtgacgaggagctcggcggcgccacacggagctcaaccgatccgcatcatccacgccacttaaagtgattatgatttgtgaatcaacggatttgagatttggtaagtgacctctccctctctcaggttttcctcagctcttgatgattttttttggatcttttatgtactttcttcatccgctaacacatgatgagtcgagtagctagcatctccatggcaatagaactaagaagttcaaaaaaattgtatgatcaataatagccttaacaaagtgacctctaagcaacaaatctactgtcccaggggaaaaattgtgatattttgaaggaaatgctatagtggttaaatacttaaatgttcgcatgttgaactgttaaaaacactcataacttgatgatctcttgacagaacctagacaaggaagggctcttggagcaactgctacagtcagctgctctactggttagttggtcacttggccgtcacttgtcaggtagtatgcacaaccttgtggtatatcatctgctttatgtaaattagtttggctcatttttactaatgttataactgtgtgtttagcctgacggtgcagcatttaaaagctaacttatacagtgtgctttatctctgttatagctgacctcggttgtaagttctgaattttgagtggtgttggtcagaacaatttatctgttgcaatattagcttttaaatgttattactgatcatacaatttttttaaaatgtattacgattcatgtaagtggctcctaacatatgacctgacatatgttagaataaatccatctctgtgtatacattttctggtgtgtccctgaaaatcttgcgaggcgttcggggaggtgctagttacatgtatgttacaaaattaagttttgtgatagctaattgatattgattttgtgggcggatgcagctgtggcctcggtgccggtgaagtgacctgcgcggtggacaagtgcaaggaggagctgagcaggtgccacgactagcaccggtggcacaaggtgtgtgaggcgctctccaagctgcccgtcgttgtcgccgattgtgagatgctcttttgccaacagtgcatcaggtaaccaatagtttgtccagatagaaaactaaatcttggtaattgatcttcaggctaagtatgatggggatgaggaggagcagaggtggcctaaatctgatggacaagattttggcagtttgggaagcatttgggatatggcaggtaatttacacaagcatgaaccataaaaagcaggatttctcctacatgattgcattagctcaagtatcagaagtaatggtgtaactggaatctaagtcttactgaggcatatatgtgtgttgcacttatcaattaacgtgtgactgggagagatcaactttactgcttgttgttgcatttacatatctttctgtctatctatttattatttgactttgtgattcttcacatgtattggatgaaattcatcggcaacctgcatcactttcactttccatggtctctgcccaggctccagaatccgtggttaattcattaccatgtaagagctacaaaaagcagacagcccaatgcagtgataacatggaacagtgagattcttaccattcaaattttatcatttacttgttgtcacctagggccaaaaatagttctgagtgtcattgaagaatgtcaagttcgccgctacaaatgcatcacattatcttacgcgtttgaaataactatgctgttcatgtccattatccatcaaaaaataaattgagaccctgtacaaaatccttattattttatttgccttacatcagccttctaatatggttgttgtagtcattttagagatcttatcaaataagcattttgtcatgggcattgggccaaaggccaaggtgtttagcgttttggatcatgacacatttgggggctaattctgccttaacaatattgtatctgtcataacgagctagaaccatgaaatatttgggggctaattccgccttcatgatattatatctatcacagtgggctatcctaaagttgaaaatcacagtgagattctattatataacaagttattcttactgaaacttgacacgattttttggactgcatatcatgatggcacctggatatgtggataacaagttaacaacatgatgataaactattagaagttgaggatgccctgtggtgctcagcaggagctttgaggctctgtgagttacttagtaggtcgctaacccttaatgatatgaatgtgaattatatgcaaatgtctagaatttaaatttccaattttctggacttatgaattttagacttgtgaatttatgatctaagtatatatgtgcaaattaatgttcataatttagacaggaatttttggacttaaaaattttagacctacaatcttttgacttaggaattttaaactaggcatattttgagttaggatatatatgcaaatgtttaggatttaaagataggaatttttggatttacgaattttgacttagacttgtaggtttttatatgttgtgatgaatggcttgtaggtttttattcgttgtggtgaatgtgaatgtgaatgaatgtgctgtatggatgtggggctgtagggatgaatttgggtttatatggaattggggttgaatggatgaatttactgcaattattttttttttggcccaacaaataggtgccggtttttaggcttgaaccggcacctatgtggtcctaataggtgccggttttgacctcaaaaccagcacctatttgacagtcacgtggcaatttggcttagaactggcacctattaggtaataggtgccggttttgaggtcaaaaccggcacctatatggtcctaataggtgacacctcctttgtgccggttcggaaaaccggcacctattagggtttccgaaccggcaccttttaccctttctgtagcagtgccctctactagatctctcatgaaagaccttcaggaagagcagcaaaggaacaaaaaatagaaaatctgttccaaccctacaaacattggtatttggaccactagaactacacactagatgacaagcccaagctaaacacctcgattttaagctatgaagaacatccactcaactatgttagaatgatgatgagcatttagatctcccatcaagtaggtttgttcataaattaacaagagaaagcaagcatactatcataggaacaatatgataccagagaatatagaaacaaattttgctgcagaaagcttgatattccttacatagcagttcaagatacaacaaaagatttggggaatggagatatgtggtccctcatactttctggcatcccacatatagctgaccagtgatttcaagtcgtctactcaggactagtcgtaagggcactgactagtcgactaatcgcgattagtagcgactagtcgtagattagtctgtgactataggctaaggctagggtaccaaggataatgtatagatgtttgtaagtattaattaccatggtacactagtatagtataaactaaggataatccaagtgtactggtcttgattagctggcaagtgttgggatcatctccaacattcctatctgccttgcacaagtacacttcagaaagcggcacaagttcatcaacggatctaatccaagatcaatagcatgatcggaagctcagttgttttgtgggaatacagagaaaaaaaatcacccttcacggttggaagagaagaaacttatagtagtactaggtaaaggttcaaagcaagaaaaggaggttatgatcagtaaattgttaaccaactagctgacagaagctctaatggttatgcatgcctccaattaattgttgtttccaagcactcaccttgtgcagcaaaattatcatgcaggcactaaaattcaatgggcctattatactatgaaaccttatcattatccataaatatttacctaaatccaaccaattagagtaaaagtgtaatacaagatcagattataatgtgtccacctcaacaatatatatgtatattaggtcatctctactctcaggatatgggggggtatttggttttgagttttgaccaaacataaataatacattaactatatcaaacattaccttatcctacaaatataggtaacattactgcagaaaggtgccatgaattctttagggaaaaaaaacaaagattgaaatgaaaaaaaaatatttaccttccacgatttgagtgattaaacactattgcatcagcaccaaatctcatcatgctcgtcttaaagccatctccagctatgtagttgagaaaggtgtgaaacaaacagcccattgattaagaattacttttgacacaaaagcataaagagcctacataccaatagaaatcaatgacaaacatttgaaataaaaaaaatctcagcgacactggatgtgagttcaaaatatttcaaaatactaggaaacaaaattattcatagttaatttattattgtgtcctctttctgtaggtctattttcttcatttagtagactcagaatccattcctccaacatcatgacagcagctacagtacgtctactcaactattgtcatttaagctgacgcttttattcaatataacaaatgtggtaccatggcaaacctgaagctataagcaatcttgaacgctgaaaagaaagagtgatgtaaacagtagctacgaaaattaccataccatctatctcttcagttttgttgtaatgatgtaaaatccaacaataagtattttattcacccattttacactagtacagatcattccatctgtgacggcccataacaagactggaatttgcgggctgtcacaaggaagtaatctcaatcaggccgaagtttcgcccgattgagatatggtcgcacagccatggtatacaggcataaaactaaagcccatcacggatgacacttatctgtgacgggccatagttgaggcccgattgagatgagggttccatatctcaatcgggccctaaaagaagcccgtcacagatgagggtcatctgtgacgggctccaactagaggcccgattgagataagtttaatgcccgtcacagatgacactcttttttgacgggcttttattaaggcccgatagagattacttgtatgcccgtcacggttcattgttttagggccgttacagatatttgttgcacagtataaatacccccccaccacctagtgtaactgtatcccactgttcactattttagtgggaggctgtagggggcgattttttgtcttttttccaaggaaaacagaaaattcccaaaagtgatcaaaatagatctatcaagtgagtaatattaatcattaattgagcaatttcatcacgtcttacttttgtaatactgatcttataagatgtgcatgtaatttgtttttttattttgtaacaattgatcgaagttggatgtatgcgaaaaatttgaaacgtcattctacggagtacagaaagggcgtaataaattttatgaacgccgcggaggaggatcggaaaagaagaaacagtgattatatgtgttgtccatgtgcagattgcaagaatgagaataagtttgatagcggagaggacgtacacggtcatctgatacaacgaggattcatgaagggctatacatgttgggtgaagcatggagagtaagaatcaggaaatagagcagcagcagacagaagtggtgcgcataatcaagaagatgaagatgagcatgacatgtttaaaccttctccattgggcggtgaaatggttgatgtggatcacgatctactgcaagacatgttacgtgacgttgaggacctagcccagaatgagagagatggaatgaagttcagcaggttggtcagtgattccgagacgcctctgtacgctggatgcaaagcaaaacacactaagttgtcagttaccttggacctaatgaagctgaaggcaagtagtggatggacagacaagaatttcacagatcttttaggaattttgaagtctatgcttcctgttgagaacacattgcccgagacgacatacgaagcaaagcaggttctgtgtccactagggttagaggtccgtagaattcacgcttgtccaaacgactgcatattgtaccataagcaatatgcggacttggatgcttgtcctgtctgcaaggcttctcgatacaagcgaaagaaaagtgctgacgaaggaaataagtcaaagaggggtggttcggcaaaggttgtgtggtatctacctatcattgattgtttcaagagaatctttgccaacccgaacgaagcgaagttagtacgttggcacgccacggagagaaggaatgacggtatgcttaaacacccagcggattcgattgaatggaggactatcgatcgaaaacacaaagactttgctgccaaccctagaaacatgaggatatgtctgtgtacggatggcatgaatcctttcggtgacatgagtagtactcacagcacttggccagttcttattgcgaactataacctcccgccatggttatgctttaaacggaaatatattatgttgtgcttgttaatccaaggtctgaggcaacccggcaatgatatcgatgtattcctggagcctgttatcgacgatctggagattctttggaaagaaggtgtggaaacttgggatgcatatggtcaggagaacttcatgctaagagttctattgttctgcaccattaatgactatcctgcactcggtaatctttccagacaaactataaaaggaaagaaggcatgctccgattgcaaggaacatacacgaagccggtggctgaagaaatcatgaaagatggtatacatgggtcatcggaggtgtctcccgctatgtcacgcatttagaagaaagaagaaaatttttaacggtaagagagaacttcagcctggtcctaaagatttgtccggagatgaggtccaaaatatggtcaaggacataagcaatgagtttgggaagaaaagaaaacgtagcaagacaaagtagaagggtatgtggaagaaaaaatccatattttggtggctaccttactggaaagatcttgatgtccgtcattgcattgatctcatgcatgtagaaaagaatgtgtgtgagagtttggttggcctgatgttgaatattcccaagaagacaaaggacgggttgaacacgcgtcttgatctacaggacatgaatattcgcagtgaactccagcccatacgagatgcaaagacaggtagagtgtgtcatggttatggatatcacatacctaatagtagttgactaaatctcggcaggacccaccacataccatgtcctatacggaaaccgacttcagatatggagggagttccggataaggaaagacaaccagagttctacatggaaacgacaaggactactcggattgtatccatattggtttccctagttctacttggataagaggacacctatgggtataaatacaagcccctaggaggatagggggacacacacggaccatgagacgatcaacacgatcgggacgaccacttcatcaacacccaacacaatcaacatacaagcctatatacgccaagacacgccgccggatatcgacttcatggataggtatggctattcccctacggtgtctctggataccgtcaggagatacgaaagcgctatctctaatcttgctgggcacggattcgaggagtaaggctaccctgttgtcgactacgagtcagaccttcagaccgacatgtcgacaatagttagataggctacccacatattgtactggtgtgattatggtgaataaaagcaactccggcttcggccaacaggatgtagggttattacctgactgctcagggacccaaacctgtataaaaatccctgtctccgtctcttttacctcagtctcgcgtatatcctagcatcaacgatccccatactgtccaaataccgtagtcgagacatcaaacatcgacagagtgtacctccctctagcctgccacacattgtcgaaggatgagaagattgcaatgttatcatgcttgaaggatattaaagttccattgggctattcagcgaggataagtaagtatgttaaattggacgatctaaaacttgttggaatgaagtctcacgattgccacgtgctaatcacacaaatcttgccagttgctatcagaggcattctaccatcgaaagtgcgtcacacgatccaacgtctatgcgccttcttcaatgcaattggacagaaggttatagatccagaagatctagatgggttgcagaccgatattgtgaataccctttgtcacctggagatgtttttcccactgtctttcttcgatataatggttcatctccctgttcatctggtgaagcaaacaaaactatgtggcccgacttttctaagggaaatgtggccgtttgaaaggtacatgggagttctgaagtcgtacgttcgtaacagagctaaacccgaggggagcatcattgaaggttacacgaccgaggaggctattgagttctgtgtcaattacatgtccgatgccgatcctatcggagttcctgcgtctcgtcacgagggaaggttgtcaggtgttggcacaatcggaaggaaaagaattaggcccgatcaagcgtcgtacgcgcaggctcattacgctgtgctccaacatatggcagaagttggcccatactttaaggagcacttagcgaaaatccgagatgagaacttggggcgatctgatgcatggattaacagagaatataattcttggttcaacgaatggttcaagaatcttgtgacaatgtccacggatgtcccaaatgagacagtatagttgttggggatgggaccgtcttgcactatagacacatggcaaggatacgatataaatggatacacattttacaccgtcaaacaagatgacaaaagcacagtgcaaaatagcggcgtccgtatagatgcattccaggatcaagttgggtcaaacacatactacggtcgcattgaagagatctgggagctaaactacgccaagttcaaggttcctttgttccactgccgttgggtgaatctacgcactggtgtcaaagccgacaaggaaggtttcactttagtagatctatcaatggtgggatacgccgatgaaccatttgtacttgcgaaacaggtcgagcagatattctacataaaagacccttcaaactagaagatgcacatcgtgagggatggaaagcgccgaattgtaggagttgacaacgtcgtcgatgaagaagaatacaaccataatcttcatgtaagacctcacattgaccttgacgatgatccccaagagcctgtggcatatgctcgttcagatcatacggaaggcataaccttgtgaccgatgcatttgtacttatctattgtaatgaatgaagtattttgttttattgttttattgcaaagacttgatatgtgtagtcattaatatggctaattttgttttattacaaatgaccaaaagaaaagttgtcgatcttgatgagaggatcaactttgttgttgaccatatttccatttgaaatcatttagtatttacaaatgttgtttatatttgtcatatattcaaatttaatttcaagctgttgggaaaaaagttatatagaaaaatgaccaaaataaaacttgtagatcttgataacctctacaattttgttgttgaccatatttcgatttgaaatcatttagtatccgaaaatgtattatgactaataaaatgaattattatacagcagctatatattttgtacgcacaaatataaagacttgtttggaaaaatggaaaaatagtcatcgttgacgggccttagttaaagcctgatagagattaatctatctctatcgagcattatcttagggctcgtcacagatgagtcatccgtgacgggcctgaatgtcatctcaatcgggcattagtatggagcccgtcaccgatgagccatctgtgacgggccctatggcaaagcccgattgagatgactcatcactctactataactagggtttctcagatcggatcgaaaatttttctaagtcccgctacagtttcccgcctccttagaaccctagcgccgccgccaactcctccttcgccaccgtcatcctcccttgccgccactgccaccgagaccgccgccgccgcctccaccgagcctgcccccgccgccgccgccaccgagcctctacaccaaccggcgtcggccttcctcgtcgtcgccgcctgcctcttcaccgacacgaacagctgcccctaccgagctcggcgacgtccttcctcatcgtcgtcgcctactcctcaccgacgcccgacgccgacctgcccgaccggcgacgccctccaccgagcccggcgccgccgccgcgaactcctcctttgccgaggccgccgccgccgccaccgaacctgccgcctccaccgagcccggtgccgcctccaccgactggcgacgccctccaccgagcccgacgccgccaccaccgagcccccctcccctccgccccgcccccccccccccccccccgcccggccgacctcaggtgagtcctccatcgcgccgctctctgctacctgcatgtggtgaatgatgaaatgtagatgttgggatgaatttagtgataaatgattttagtgattgattacatgatgatgaatagatgaaatgtggtgcattaatgaatttagtgatagatgattttagtgaaagatgattttagggattgatgatatgtggtgaacggatgatttttttgattgatgacatgttgatgaatagatggaatgtggtgcattaatgaatttagtgatagatgcatgatacgtggatgaatagatggtatgaggtgaatttatgattttaggatttgatgatatgtttaatttatttatatgtgacattcaattcattctattactgtgagatgtgcaatttagtttatttatatgcttcgtttatttataagtgacattcaattcattgtaatagattgtagcactgaattgtgtattttcgttattttgaaaaaaagaagacgatgtctcagcaaggcctgctctcaaagacgtgaggacgacctcctcacgaaagtgttgggcaacaaggaacaccgtggacggacacggggcgttgggtcttctgttccctggaagtatggatttccagactacgcgtggcagtacaagaagcagacttccaacaaggcggagaaagatgcacgccttgaagccaagatccgggcgtcgataagagctgagctgacatctgaattcaatgaaaagctcgagtcgatgagggccaagattaggcaagagatccgagaagagcaacagaacccccaggccgccgctgctgctgcgcacgaagagttaggaagtcccaccaaaaaacgcagcagttgcgcatcaactgaggtggcggaaaatccaacatcggtcgacagcgccgtcgaccacatagcggtaaaagtttcgtccacaatgcatgaaagacttaacgaatccatatgatatataatattattaaaaaattgattaatctatcgcaggaaccaacgagctgcaccctcacaattaggttgatgccgaccttcacggttccagcagccgagggacttgcgtacaagccgaccccagagacaagagtgcatggagcgcaactcaagggcggccgtgcaaaagttcaagtcgactcggtgaagtcggaatacaagctattcccactaaagtatccaccgaacgacgaggtcctctcactaggaaatgcccgtggtaccttcatccaatggcccaaggacctcattgagatcagggttacagcgaggctgtcacgcccagaaattcacgaaccagaatttctaagctgaatgtgtattaaacccctgtccaggaccagccagggtacacaaacgacaattgttgacatacagatccacgtcttacaaaaatataaaagattacaaatgcagcggaaaaagtaaaatgagctaaacttgaaagcttgacttctgcagcggggcgactccactccacaggcaatcctcgacggcagcgacgaaaccgacctcaacgagacagctccaactaggaaaatctttagctctggtgtgggggaaaagagagcaagactgagtactacccactgtactcagcaagtcataccggaagaggaggtatgatgcaggatatgtccaagggaggctaaaggttcttttgcataaagctagcatttaaaagcagtagttgaaagcagtaaaatagttgtaataattaatcaatattaaccaatcactgtccaacgctacaccacgttgcaacaggcccaaccaaccacctgaactacaccagttcaaaagctaacaaggggtgagactaatcacggtgaatctggtcgaccgcccataaccgcgggcacaactattcaaatagttttactctgatcagaggtgtacaactgtacccacaagacacagcgccaccacacgtttccatgcgccgacatgccaccacgacataccggaaagaggccgtgacatgacccttcgcataaccccctctaaccgatcgcaccacacctcagggttcgcacccgtccccagcaagcaatgggcagcccccctctcgtgccgcggtgaatccggaagccgatcaactggacaccccggccgaaccaactccatcacgcccacccttgcctgggtatgtcggctagaggaaagctacactacaagcccagccgttgcccacgctggcttgtggtaagcacgataaattcttctagggtttcccgcgaaccggtccttaatcgccatgggcacgactagcaaaaaccatgcacccacagcccaccatgtagtgtattttaattaactaacaccattacggtgccactaatccaaagctataccaataatcaaagtctatgcattaatgtaattcccccattgtgtactagttgaactaagcatggctaagcaatccctaattcaacatctaatcattttgatacccaagttatcaatggcataaggtaaccaatatatggctgagtagtaggacccatcccacatgatactataaaataatgcaacatttaatagaaatgcgggacatttgtaaattgggtacaacatgatcaattgtaatgcatgacttgccttgctctcgcactgatgagaccacaacaacgtattcgaggaaccgtggatcgacgaaacggctgaaatctacgtgacaaacaaagcacacaagcaaaatatgctataagtctactgaaacaggaaacaaaaccatttttaatggattctatacatttttatgaatttactgagacttgaatggacttaattggagctcggatgaattagatataaattttagaagattaaatgtgtttttactataaaagaaaaggccttaatggatttcattgcgcaacaaaggtccctgctgacatcatcagggggggtggtgccgacatgcgggacccacgggtcaccggcacaagaggaggaggaggtggcaccgactttgggtgggccccaccgggcagtggctcaaggggagggggaggcgcccagtcggctcggctcggcttcaaaccggccggccggccggttaggcgttgcggtggcggcaagcggccactgacggcggcaaccggcgagaagacggtggcggccggcggcgcgggcggcggcgcatcgcgacgacgcgtatgcggggagcggcggcacgcgcgagaggaaggaaaggggagagaggtgccggcctggctcggtttggcttcaaagccgaccgacggccatggcgaccgtcggcggcgcgcgcggtcgccggcgacggcaaccggcggcgcgggcggtgtgaaagacggcggcgaccggcgcgaagggcggcgacgcacggcgtggcccggcactaggagagagagaggaaggaaacagagggggaggggcacctcaccgtgagttggccggcgtgggggaagacggctgcgaatggtgacggcgagcaaccggggaacgacggcgatgggcggacgagcttcaagacctcctagggaacaaaatgggagggattagagggagaggggtggtccacggcgggcggaaaccatggccgaaatcggcggcagtggtggtgcaaccatggccgaaatcggcggcagtggtggtgctcaccggcgcgcgaggagaagcagtccacaatggtggattcggccgggcggacggtggacgctgcggttcacgagatggcggacgcggtgacgccgatggcggggtgtggcggcggccctagcagcggcagcgcgcggctggaggcggcggcaagcggcggcactagaggcgagcggcgcgacggcggtaggaggcgcaggatggagcggcgagagcggaaaacgaaagaggaggacacggggagtgttttataggggctcaggagggagtggcttgggccgggatgggcggcaaccagcgtcggagtgggcagcgacgtggagctcgtggggaggtcaaaccggcgccctttttttgggggaaagtgggggagatggtggtgggagaaggtgggcggtgaccacgtcgcacacgcgcgcgggagcggcacgggcgcgcgggaaaacgccgcgacgtggggcggctcgggcggccatggcggttgctggcctgggtgagaggaaggggatgacaggtgggacccacgggcccacctgtcggcgagagggagagaggaggccggttgggggaggagaaatagactttagggggggaaagagcagagggggctgagggaggggaggacttgggccaagcccgaaaggaaggaaggggaatttatttgcttttctttttatttaaattgatttagtgaactttgtggcattaaaattatttcttgagctccgaaaattcacggaaaaatctagagagtgtattagggcacagagaatattacaaaatattcccggccaatgatttttaaaggaaaattttaattctccaattatttcacttaattatattgatttaacttttatttaatttctagaaaatgcattatttaatgatttttaatcctgaacgaaaatcggggcgttacaaaggccaaccactacaccaggcggtcgtctaccaaagagacccgcctctgctccttcagcccctcttgctcaagatcgtcatgcacaatcttacgatgtgcagttgcagtacgacacggattttggggaggaccgaacggaggccgacagcaaggcgattcatgaacccccaccgatgaagaagagcaggaaggcacactcttcccctcagagaattactctcgataaacccgaagcaaaggggagaggaaggggaggaaaggtgcagtcctcgcttctagctccaaggaagctagatctgggcaagggccaggaagagactaagggcaaagaggtcaagaagaaatacgtcgctccacaggacttccaactaggcatgccattggttggagatgatgtgcttgccgcaatgggcaccgcttgcaaggaccttcacgcatactacatggagaaatctaacgctaggaagccgaataaagctaccgatatccttggagagcacgatggaaagccattccttggtccaacaaattatatcgtcgtcgacttcaaggatctatttgacctctgcaggctccgagcggtggacacaagcctccttaagtgctactccttgtaagtattgtcgcccaactcaatctggtaataacaatcggattaactcgcttacaagatcgtttatcctgtgtgtaggttaagttggcaatggtgttagaagaatgcaccggaagttgccttccttgatccacaagtggtcactgtcacaaatctccagaatgaccgtcaaggaatggtcaactacatctacgacaccttgtggtcccgccaagacaaggagtacattatgtacgcctataatcaatagtaagtgtgttatctaaatatacacaacagcatgacacattccttcagtacttaattaactttcactatattaatgccgcagtgcccattggatccttctggtcataacacctaagtggagtacatgtcactacttgaactccagaattgataagaacgcatatgattggaccccaatttaactagcgatagatgaagcgtgggcccaatacgtgcaaagaggaggcctcaggaagacaggacatgacaccctcatccacaaaaaggatttcccggtgaagcaacaaataggtgaccagtgcggattccatgtgtgccacaacatgcgccttctgtacagagaaaaggtgaagactttggctaagtttgaggtcggtggtctcaattgtgatagactaactacattttagtacttatatatgatcgatcaactaatctggaattatgacaatgtagggcacaataaccaagtctctacctaccagctttgaggaggttcgtgagaagatagccagcttcatcctccgcgaaataattaaccccaaaggaatgtttaggcttaaactaaaatgatgaacaatgttgaacttttatgtttaggcaatgatgaacacttattatgcaactgtgatgatgtaactgtgatgcttatatttatgtatatatttcatatgtttatgttaagacttgctaaataaatatttgatccaattaactcggttttgcaggtgaaatatgataaatatttgaatggatgtgaaatatgtgaatggatgtgaaatatgagatggctatgaatgtgtggttgtgtgaaatatattgatgtctgtgtatgtgaatgcatatgtatatgaatgggtgatgctggggagctggggatattggatatctgtatttgtttctatcatttctgcagcgggcatggctagcaaaggcctgaggctagccaaaaaacaaaattttttttttttttgtagattatagtcatctgtgacgggccataactaaatgcccgattgaggtcagtagtcatctgtgacgggctctagtttaggcccgattgaggttagcggtcatctatgacgggctctagtttaggcccgattgagatgagtatcatctgtgacgggctctagtttaggcccgataaaggttagtagtcatctgtgacgggcgctaattgtggcccgattgagataggtcatctgtgacgggctatagtttgactggtcgtctgggtcaaaactatcggtgacgggctttacttagggcccgattgagatagattcatccgtgatggccgttttcccgattgagataactcttcacatcagtgacttctagcctgtgacgggacgctgtgcccgattgagatggggcttaccacccgattgagatgagggtatccgttctagtgttatcaaactacaccatacattaggagttcaacagtggccacggcagattatgcgaaactacatacttccttaaaaaggcgaaaccaaaaagtggccatgaacagaaaacattctatagtatcagtgcaaccaagaaatacagatggaccagcatgcaattcattttgctataaccaaatcacattgaagggcacattgaacaattacgaaattttttaaaatttcctatatgtctagagaatgtggaatcaggatagaaatgtcagcgagatatatggtaacaagtcttcaataataccattattgggtggcaaattctcaagttgacctttcgacaactacaccggaacatatgatttccaagataagttaacaaagaatttataacgtaacagaatctataggcatggtcaaacaaaaataaatcatatagtagacaagcaattcaaacggcatttttcatcatcaaatagcactaactggcaggtcgaagaataaaggaagtaacaacaagatcgacaagctccagaactagatattgacaaagaaccttcatcagaaaattaactcgcacaaatttaacaatgagttactactaaatgcgattcattcatagcatgcatgcctcacatagtctcaatgaagggcggcattaacagatcaggatcagggctacatagctagtcaattaccaagtagatataactgatacgaactgatagacacaaatagatacacaagtgctgcaactgcaagatattaggggcataaagataagctggaaacaacatagtttgctgatcagatagaaatcacggtagctgatactagctaatactacatactaatcgatccatagataatagagataggtaagggccagctgaatctatcattatcctgcagccaaagtcagtcttgtactccaccatctgtgatcacagcgagcgatagcaatttgggtcgttgaagtcgtcccagtcagcgcagacgacgtcgctccagtcgatagcggcccatccttccttgagctgagcctgcatttcggcctaatcggtgtagtagctctcgtccaccatgtagcagccattctcctcaacttcgcggcggacctcgtcctggaattcctcgaagctgtcctcgaactccttgcccatggcagccatctcctcatgcagctggcgctgctccggcgagagaagcgcccagtggacgtcgtcggggcagggggatggctccctcttccacgccaggatgaagtcgacctccgcctgcggcaagggctccttcacaagtggcttctcgctgtcttcacctgctgcagtaccactggaggccgccattgccgcatcggcaaacgttgctgcaaccgccgccttcgcagccgcgcctcctccccctcggtctccatgtgcttgatgcccatgccctgctgcttcaacgccaccgccatcggaatctgattcgccttgccggagatgtggaggacgtacgaatgagcaagatgaggcggcggcggccgatttataggggacgcaaatcctagtaggaatcgaactcggtctcgggatggctgttttttagtcggagtcggaatcgagtccggctcgatcggcctctctccgtaattgggccaggcctatcctcccgcggaatttaacccgtgggaataagttcatccgaggtcccttaacttgtcaaggaatctgattttcatgcttcaaccgtgagttcctcaattatcaaaaccagtgcaatataggtcccatgatagtttggactcggtcttcatctgacgtggcataagatgtaaaatttaacacttttaaaattataaaacaaaatatatgagttggtcaaataataaaattaataagacaaattttgctacaggacatcgtgaagcctacggacaccgcacgaagtgacttttggggaagacactctcaaaatatatggatatttgctggtggaaaccgcacgcattaaattaataatttccaggtggaaaggagagagaaatcgcgtgaaatatcgaaagtgcccttggacccacatgtcagctctgctattccccactctctcaggcggcagcaacatggaacggcgacggcgatgaggaacccgcggaccggcggcggcggcggcggcatgaggctcgggtgtcgctgcggcatccccgcacgcgttcctccttgctacggcctccactcgggtgacacggcgagcatccccgcgcgcgttcctcctcgtcgccgtcacaagcgaaggtggcgctgtggcgttccacaccttgctactgggatcccacactaggcgctggatcacgccggcctcactcaacacaggcgggagaagggggcggtggcagcggtgaagacgtgggtaatctcgtcgggcatattatttattaaaaaatgtgagacccacctgtcatactctcttcccctcttcctctctctcttctctctctcgcgggtctcgcggcggcaggtgttcggtgccgcgagacacggagcgggcggctgcggtgaactccagctgaggcggcggcggctacggctgcgtttgcactaatggataatctcgttactgataggcgatgatggcggagtcgcgtgcggcacggtcctgcgcgcgcggcagcctcgcgacggctgcggctgcatctgcgctgatggacagccttgtaactgatacttcctccattccaaaatataaggcataaccaccataacccaaagaccaagaaaataattattatcatcttatagtttggatcatcctaataaatacaatgcatgcatccaatagaattagagaacatgagagtggaggatttaaaaaagtaataatttaatggagaaggggtcatagttaatcgtctacatgcatgcatgccttatattatggaacatctaaagaagtggttgtgccttatattatggaatggaggaagtattaccgtttgtttttaaaaacaaaaataaaaggcgcctgatttgtcgataatgattacaaccaggcgcccgacgcggggggagccggatcgggcgctccccccgcgcggccctcccccacacgcctgcatatatgctactgggccccaccatagtgcctgccccacctgcaattgcaacaaatcaaccacatattttgaaaaccctctattaaaggaatttggtttattttttgttccaccaaaaatgtttcacctagtgtactcacaatgttttactatgtatagatctaatattgcagtgaactgaaatattccattgcaacaaaaaacccacatattttggaaaccctctattaagggaattcgttttatttttttttcaccgaaaaatgtttcacctaatgtacacacaatgtttcactatgtatagatcaaatattgcagtgaactgaaacattctttcgctatttgctgaaacattgtttttatataaggtgaaacaacacccggtttaaacgagtgaaacattttcgatctacttagtgaaacaattccgatatacctggtggaacatcgtgcaacatttaaaaaaaattcaataataagctaatttttttttcgtcggaatatatccatgtgtggtcttgttttgaagatttaattgcaataaatttaatgttgcaatcagatcatgatttggataagtaatttaagataaaaataagtttaaagtagttttgcacgtaaatcgggtgctgacgtcatgctgacgtcagcgcacgattttttaaagatttttatcgggcgaccgatccctagtcatccccctgatttgtttaaaaataaaagacataagttagttcctgtttttcagttagcgttttcttgtgactaagatctcgctgatcgatcgtgggatggcgcggtcaagtgcgcgattttggtatgtgtttccgttttgtaacaaactcctagagttcggagtataaataagagatgagaaccgggaaaagctgctaagtcgttcgctgcaccaaaaaaccctgtgttttgctctgtttcagtttcgtcagagttcttcagttctctgtagctgttcgacaacctaaagaaacaacgagtttttcagtgaagtccaattagagagcaggtgagattcgagtgctaggttagccaattccaacatgcaccatggcgtgcgcgtcctccccggcaaacgtctccgacgtgttcgggcgtggcgggcttgtccttggccggcgccgtctgcgccgaccacccccgccccgcgtccgcactgcggcggcttcttgctccctcctcccgccacctgctgctgcttcgccggttgtctaggtcagagaggacggggaaaagcggcgaaggttgaggacgaggtgcgtgatgcgccgaggcggtcgttcttcgcgtggccggcgggcacgacgaggagaagaacgcgctgcagtccacggtcgcgtacgacgccgaggccgacgcatgggtgccgctcccggacatggcgacggagcgggacgaggccagggggctctgcgtcagtggcatgttcgtcgtcgtcgttgtcggcggagacggagctcgctcgggcagccacgacggcgccgcctctgccatgcacgccttgctcctcgccgccgcctccaccatgtacggcgtcggcgggcggcggcggcagcggcgtcaacacgccctccacggcatccgcccggcggcgcaaccacgaggatgaagacgacaacgatgacgagtagtccggcgaggggcgcgtcgtcgaggcctgggcaaggggcccggatgagtccgtctccgctgccgaccgtccgggtgagctccgcctccgccgtgcaggccttgcgtggttgcgccagcgagagagaaggtatgacatgtgggtcccaccattattgtaaaaagaaaatgctgactgggttgtcacgcgtacaccacataggataaaactgccctggatttggtcgagggggtattttgtccggtataaaaagttcggggttagtgatatctgattttcgtgtccagggagtaattcggttgaccgcgatagttcgggaggtaattcgtactttttttcctaactattggagtaatactttttatgtcatattggtcccaacacaccataaatcatatttttgtcatttgaagtttatagagcgcacattgtgttttcttttttttttcactatttctatggtcctctccttgcactgacttaaatatatgacgacaatacaaccaactttgaaatgccaggtttgttcaaaaggacaaaatttgtccttatctttctctgtgtttaacatatttttgcaatggcattaattaactatataggaaaaaaagagatttactccggttcaaaaaaaaagtatatatgtcgaggtaccggtacttcatggtaccaaatcgttttcgatctttggatccagctaggtaggatagacattgttagatccaacgatcgtaaatgatttggtactgtgaggtaccggtacctcgacatacttttttattagaccggagcaaatctcggagaaaaaagaactcaacggacaacgggagcccatatatgcttatcttttcattgaaagaaaatcatacggttatatgccctattcccgcacaatagacacatgtgctctctttgaagtccagcacaatggcgacgtatatgaatagtacgaatggaaggtatcgggtgcttaaatcactagatttcgttgcatacttgctctcttgctgccggacaaatatcacacagctgagcaaggagcaattgccaagacggaaattgttgttgtcagacatcatagagcgatggaaatctagtagctcatgaagagcatattgtccccagcaatgtgtgcacaagtgcacaacacttgggcatgcgcaacgtcggattgtatgtaccggttagacaaaggggttgccacatgccaaccagtattaatgtagcttttttccaataatgagatcagcattttcagtctgtttggtcctttgccattgtttgccttgccaattttgggcagtggcgagatttataatttaccaaaattttgggaaaggcgcttgttttagattattaattgcttccaaatttttattcaatgtctatgccaaacttaattagccaatttggtaatgataaagttttgctagaaatcaatggtagagagagtatacggcaatcccaaatgtatttgatatgatttagtttggctaagatccaaaaaatctcattccgtgtgacatcgtatagttgtcattgtcagtcatttgaccggttatgttctaactttagggtgtgtttagttctttggatataaagtttttgaaatatacggacacacatttgtagtattaaacgcagactaataacaaaacaaattacatattccgcctataaaccgcgtgtagcgcccgttccgtcgtggcgcctagtgggaaaactatctcttaaaaatcctaaatgcgaaaattgtttctttgtttgttgtctagtacccgtgccattccagatctcaaatccccaatccatcatcgaatccaaaccctaatctcaaatctgtcccaaatcaaatcctctcgaaaaagtctgttttgtctccctcgagttcatgggccgatctcttctccccggtccatttccctctcagcccatctctcctctcccctccatccttgcccgcacgtgcgaggcacgtgcgccgctcgggtgctgagcaagagagagggctcgctctctctttctcttctccctccctctctgctctcgctgccgcttcccgccgacgccgcccaaatcgccgcgccgttgcttcccgcgcgcgcgcgcgccgtggtggccgaccggccagtcgccgccgccgtcagtgcctgccgcgcctgagcccgcgcctgccgccctgtagccgcgcccttccaaaccgccccgccgtcatcaccgtcatcatcgacccggtcccgccactccacgcgcatgcttccaaggaatggaggcagagctcctcctccatctgcctcatcgctctctctccctctttcttttcccaaagaggcaaggggcaagccccctttcttccttcttttttcccttttatcttcctccgccggcgtcatgccctctgtcgcagttttggcctcgaccgccgagcgccaactcgctccttgaccaccctaggtcggtttccaaaccgacattgccctcctattaaaccaaggtgccctcccttcctttccctctcccattcgcctcgcaccaccgcgccattgctgtcccctctgtctttctatcgccaaccgccgccgtcgcgtgtgccggaggagccggtgcgcgctacgacgcggaaggggactccgggcactcgtcttcttcctcttccccggcccgaggccggagagatcactcccgtgccgtcggcctctcgtcacagcgccccgcctcgtctcggtagggcatccctccgttctccctcctcgctccatctcttccccttagctttgagtagcagctcgagtaataccccagtagctagttggcgccaccccaagccgcgccgccgctcgcagtaggctcgccgccgtcgccgcccgcgctcggtagtagccgcccgtcgccggccttcctcggcaatgaccagtccaatccgacgctagaaacggattcccggagtcgcgtagatgctctagctcgcccgaatcgatctcccgtcgcgccgtcgccgttttcccattctctcgccgccggttgctgccgccgcaatccgccgccgtcgagcctcctccggcgaatccgagcagttggctcgtctcccctcgtcccgtgcaacctcccggtgcgctcgcccttgcctgcatcgctgtagatcgccccgccgctcgccgccgccgtccgctgtctattccggccgacgtcgtcgtcttcctctcgtcggcccacgtggctgccacgaaggtgccacgtcggcgccacctcggccgcgaccgggtcaagctgaccccggtccgccgctcccctccgcctcgctcgcgcgcgcggtccaccgcgagccatgaggctgcacgtgggcccgctgcatccgcacccaccgcgagccgcacgcgtgcatcgcgccccgctccaaaccctagcgccacatcgcgtgctcctcgctcacggtgagccgagacgccgacaagcgggtcccactcgggaccacgcgagttggacccggcccaccggctccctctctcctcccctcccgcgcgtgccttgggccgccttctcgggctggctggcctattcagcttggccgagccgcccctttctctcgggccgcgccctagccgcctgagggaagtttgtttcccctccctctttcattgctaattcaaaaagggtttaaataaatccttttcttttaatccaaaaatccaatgatcttagaaattcaatatcttttcaaccatacatccgtttgactccgttcaacttccaaaattcctcaaacctcgagatctatctaatggcatgcttagaggtcaataatagagctttaatttcgccgtttgttgagtcgtctcgttcgcgtgtagcttcggagcccgaagacccggagtgcgcggttttcgaggatcaagctcaagatctcgagtaaggcaagtcacctttgatcatcttgcacctataatttaaatctaagtatttctttttcgcaaatattgcataaataggattatcacgagtaattcggccacggcttgcgagatagcctgccggcccccaatcctaattgctacaattaccctccttgaattattgaacacttaaacctcctttgtcgaccgttgtgcttcgatgcacgggcctataggcacgcgcatcggaacacctcccctcaaatttaaaatatccaacgatgggtaaaacttgggttttacaaaagacttggaaaacccgacacctgggtcggtgcttgcgaactaaatgaatttccaaaatcgcagatcagggaatataccgggagtacggtttcctgctcttgcacttaaggaccgttttccttggaatttcatctgaacataaggcaagtgcgaccacatgggtggaatgggacgcccctggctgagtaattagctaatcggaggagccatgatgccaagagacatgtggattcaacggggtggtgccgggggaacccccgggcttcgtggcacagtatggtctgggacctaacctgatgtcggtctgggacccctctcgttggcatatggtgaacctgtgtcggctttcgaaatgccttgtcatgaaagcctcaaggtctccagtcgtggccgttctgcacgggctgggtgatccgggttagtaatgtcgtgtgggtaaagtgtaccccctctgcagaggttattaaactattcgaacagccgtgcccacggtcatgggcggacgtgaggtgactcctagcgtagttttgtttgactactgctttgtgaaactgctgttgtggaaagggttcgatgttgggaaaatctgcggctgatgggatcagctagggccgggtggctgtatgaaagccgttggccgggtgccaaccttgaatcaattaaaagactgatacattgcacatactccgaccggacgagacgcactgtcttatccgtgtcgtttgagaagcactcacttagttgtttcaaaaaggagtttaaataaaatcaattgcaaaaacaacagccttttctttgaagcctgcattaaacacttaattcccatggcttgctgagtactcatgtactcacccttgctttatataaataatcccccctagttgctgaagaagatgaagtggatcccgctgacgaggagttcttccaagagcaagtcggctacgatgagttttagggtttcggtttagttcccaagtcgcgcctgtgatgattggtccaagtcttggcttccgttttcccttttgtaatgcagttgtgagctcgggatctgtccgcagcccaacataactgtactcctactctgtaataaagaaacttctgttgctgtgatattctgtcttcctgtgataccagcactgtttcctaggactggtatcgattaacaggttaatttggagcgtcacgggctagttccgttcggggctagttcggggcgtgacaccgcgagacaaatttattaagcctaattaatatgtcattagcaaatatttactgcggcatcacattgttaaatcatggcgtaattaggctcaaaagattcgtctcgcaatttacatgcaaactgtgcaattggttttttcccacatttaatgccccatgcatgtgtccaaacatttgatatgacgtttttgttcaaaattttctaggatctaaacaaagccttagattatatagaaacttgcttccacctcacatattccagctctcctttttcaaacttaaaaattttgttactaactcaatattggtagtaggctagtagcacctgagatcctgggttcgactccccatgggagcgaattttccaggatttaacggcgttgtgctttcagtggtagccgacttacccgtcgacggtgagacgcctgtggtgacttcgtcaatttctctaggatttgccggcccagtcttcgaagatgctcataggggtagggtttgcgtgcgtgtgttcataggggtgagtgcgcgtgcgttgtgagtgtgtgttgtactgtgtaattctaaaatggggctaaaaaaacatatattttcacacacaaacctcagataagcatgagatgggcctagccttacaccgttacaatatgtacgtgcatgcatgaagcatgccatccgcaatataggtccatgaggccacacgccgtggtaatgttgcgttcaatttgcagcccactctgtcgcagttgacataaaggcccagagcctctttttttttttaagccaacaaaacatacatacacattataacagttgctagctagcctatcagaattgagaaatttcatgggtgtagttatatttatggcgccatatttttcatcaaaaaatagtcggcatgtatttacattgtaagtccctaaattacatatgtaattttagtgtatttacaatgtaagtcttaaaatttcatatgtaagtactaaaattacatatgtaaattcgaaaattacatactaattacatatgtaagtggggtgtaaatgaggtgtaactactgtgtaagtggctgaaagaaaattgactgtagcatatggcgtcatatttctagcaactccgaatttcatggtttgagaaattaagtacctcaaggtacataaattttatactaaaaaatttagtacaatgtagtagctaacaaaataaacatattaggatatacattagaaactatagtagctcttgatatcttcttaagaatggtaaaattacccatcaaatttggtagtactattgaaggtttgcatttttcaaagtactgtcagaatttaataagattgcaaacggtcgcacgcgtctacgatcagaacccggtgctaagaaacaaaatgagtatacatatacgaatacaagatcatgcggtggagtagatctagagacatggagtatatagttattaggatcgggagtcattgggagttcatcaaatctgcctcagcccatacacccttgcaggtcccattcatcctgaacaacgagtcccctctgttcctgcaccggcgaatcgcgtgatctccacggtggcaggcgatcggcatctgcagtggctcttgcgaccgttcgccttggaaggcgttcaaatgatgttccagaaggtgaggcttgatgtcagctatcaaaattgctcggttggtgtttccgcggttgtttcaggccatgcaccgaaattcgatcaaacactagcttgcacacatttttgtttttcaaatttgtatcataaaccggcactggacggccagatcacacgtgcatcactctttggcttccgcccttggtgaggtgagttttggagcaagcaagctagaccagtcaaggcttaacattgctctcctaaactacagataaagtttgggtctgaaagccaaaacttggttgaaacatcaacatgtgtaatataactgttcattcaaatctaacaagcttaagcctaaacaaagagggtcgtaatttatctcccgttttattctctttcttcacttctctcttctttatgttgatgtgaattttttagagtctgctgactaaacttattttacccgctctaacaaatccttctcatttaacagttcgggaaacgtgcgcatgaaaaatgaggtagtagaagataaaaaaaagggaagttccaaacacacagtaaagcaagatgtaatattcagcattcagcaattgttaagtcttccgacattttttagatgaaccgttgtgaaaacacaaagtggaacactaagcaaaaaagtggaaatcaactaggaaattttagcttagtcacaactagctccatcttatctcccctggctctggacaagcacatgtcgctatggcattccaagaatcaattatgttatagtgttcggtgctctgcatggttagctctactgaaaatcaggcgaacgtatcctctgccattgatactagaatggcatagagctacagtactctttaccactagctattttcaaccgttagattaaacgtggatggatgagattggtcgctatagtactcaacagtaaatcaatacagtgctagcaacagtacttttacactgtttgcacagtaccttcattgtgcttatatcagaacactgtagctcctcccctttttactgtctctcggtcattctctccctaatgttagacaatgtgaatccgaaaatcaggttgagttaacagcattgttgcaagcacaggcacatccgcagtactgtcaggcacccactcctattttgtcaaaaagaaaacattggacgacagaagttctgccagatatattataagaaataaagaatgccattgttacaatcaacagagaggaaaaaagacatgtcagagaccagagctctcaaaacagcgcaccatatatatgcatcgccttacataactgcaagatttcttttaaaaaaattgttaagggcccctttgaatcacaggattgagaaaacgtaggaataggaaaaagattttgataggactgtaagtgtaaaacagaggattgcaaaatacagaaaaaacacaggaataaccgtttgattgaaccacaggaaaaacacaggaattggataaaagatatagactcaaaggaaagttagcaagaggttgaagctcttactaaatttcctccaaaatctctataggattgtccattccataggaatttcaaaggattagataggattcaatcctttgtttcaaagggcttcataggaaattttcctataggattaaaatcctctaaaattcctatgttttttctccaaatcaaaggggccctaagagattaggccctgttatatagtcttggagtcacaaatccaacgaggtggtcaacaaaaactgagtacgtacctattaagaaggtgcagtgttcatgaccatatattccaccatgcaaattgttgcaactagatttaggattgggagttatcagaatctcgcagcacctggactccatgtatttaactgcattatatcgatccaagttgaacattgaaggtcatttggtttcgccaatatagatgggtggcgcagtaagagaacaatatggaaaggttcatgcgcaaactacaaggagacaagaaaaatttgggcaccgttggtacacacaacgtatatgcgcacaaaatttttgaagtgatgtccatgtttaagttcccaggcaaaaaatagccattgccacaaaccaaagtatgtcatctaatctccatttccatgtatccgcgacttgtctgaccgaaggaaaaatttggagattgagtgaatctagcttaggtcctgtttaagttcccatgcaaaaattttacacccggttatatcgaacgtttagacacatgtatggagtattaaacatagataaacaaaaataactaattacacagtttgcgtgtaaactacaagacgaatttttaagcctagttagtccatgatttgacaatgtggtgctacagtgaacatttgctaaagacagattacttaggcttaataaattcgtctcgcagtttacaggcggaactgtaatttgttttgttattagtctacatttaatacttcaaatgtgtgtccgtatatcggatgtgacacgccaaaactttacacatctaaacacccccttacatttgttgttgcttgatgcacaaactaattaaccatgctacaaaatcgcagttagaaccccaatagggtcttgtacaattttaatctggcccatcatggtcactgcacggaaattgaagaatccagtactatgatgaaattgtacatgaggatgttaaaaaacaagaaattgcacatgaggtatcagctactacagcatatagtagactattatactatcttcagttgagatagctaccatacttcaatatctcattaaaccactacaaacccgtaatagcgtgtaattatatatataacaagcaacaagccaaagtcaaggaggcctctaccgactaaagtcacatacaaacaaccaatcgtagagaggtagaagcctagaggatgaatccaatgggagataataggttataaacaatggcgaccatgcatatgaataattagaaatggaaggtatcaggacctcaaagcaacggacatcattgcattgccacactcttgttctcgtaactgtgccatctatgctgatcctttgtgtacccaggcatttagctagttaattagaggaggtgtgtcggaagtggccaacaaaatattgggatccataaataggagaaccgttggaagagtgggtgattttcagccccaattgtttttgatgatcctaattcaagattattggggttaaattttagatctctcttgcagatgctcttatctaaagtagtgaaaaaactaaactttttcaccaccagaatgcgccacatcatcgggaaaattatgtccgtcctatgtaccacacattcaatccctaacgttgcatctaaaagagatgtagtcaaaaggtggcttgggcttcgacccaaaatatgaagaggacaagaaaaatcgtactatgcctcgagcttacactatggaccatggccacaggcgacacttccttttcgctctccgattgagttgaggaggaagtgctgacgcagcccttgtcgctccaaatgtgggacgcatgccacgatgctcaccgctcaccgcacatgtcctccgcttccatgtcgaggccgccggtgcctcacatcgtgatctcgtccttctcgtctgcactgcctcctcggagacttagtcgatactttagccataagttcacaccacaggacgaagatgaggaaacattaattggagccccgtgccccctccgcggtcacctaatcctcatcaccggccgccactcccttctctcccgtcagatccgacgacgagttggccgcatcatgccctagctaccacggcagtacggcataagcttgagctcccgatgaacttgctgtgtcgggctgagtccatcagcctgtcctctcaagtttaatcgcgtgaggtgaggattatcttatcagagaaagggggtgaagagacagataatgtgagagggtgagcggtcaaaaagataacaaaagaaagaagctagccagtgagtcgtcatgtagttccgtgtctggctgttaccagcaagagttactgtggttagaaaatagtactacaatgcaacaggtgcgtctcactgagataattgatggcattatcccagtaacaggcatgatgtagtttgatcagcaaggacgctagccaatttaagtgctttctaataatgcattaattaaatacaaaataacactgatttttttactgagagtaaatttttgtaaacttgtaggaaaatatattgttgcagtgcaacaacatgattagaataacagaatataggaaatataaataaagaaagaagggagataagagggggaaaagagagagggtggtgatgtggtctctctgacatgtggagctcacgtgggtcccatgctgactcagccgtcacgtcggataaaactagggttaaaattaccaagggacataaagtgaatggttttgtaagttgagggatgtcttatatcttgttttgtggtaactcaatgacaaattgagggaccttcggtgtacttttttctattctaacctgacaatatatccttttcgatttagaaatgcagcccactctggatgcggcttccctgttcctgtgttatgttcccctccctgtccctgccagatgtcctctctctattggctactgcttttctagtggacccaggccatgcgctcgttttcttttttaacgtaaacgacgttaacatccaggatggctcgtttctgattggtgccgaggttgccgaccaatgttccacgctccaaatggtgagctgtgacatggaagcaacgcagccggagtggccgacgccgccggaggccgcggtgaccaagacagggtgtccagggcggcgctcatcatcttgagcaagtgcggtgacagcacggagagtggcagagatgcacccaccgccgctatggatccatgaagtaaaaaaaaatcctagcgcctaggaaatttcgaagacactcaatcccccaccgaacgcccgaacgccacgacttctccggcgagatcacttgctcatgtgattcttttagtttactagcacatatcatcttaaattcttaagtattaccagaaattgattgcaggaatggtcgaaccatgcctggctacccttgtctccttcatcgtcctctccaacaacgatatcctcctcatcaacaaatcaacaattaatggcctcaacttctgtgtgtcacccgcccgaggtcgggatggatgctatgggaggtcacattcttcaacgttagcttcaactccctcgctggcccgctcccaccggaggtgcccgggatgcagaaggtggagtagctcgatgtcgcgcacaaccacctcttgggcaccgtgctggaggccgtgcggcctccccctgctcaggaacttcacctctcctacaacttcactggtaagcagccgtcctgcacacgcatattgcccatcgatggcaatggtaagcactggaaattgccttgcctacccaattgccccacctagggcacgccgctgcagtgtaagggaattagggaaagaaaacggagattgctgctgtttgcttcaaaaagaaacggagaggttaagccgtttagatgaaaaaaaaaggagcgtaaggccctgggcccgctggaaaagcgatcgccaatagagcgaggacacctggcaggggacagagatagaaacacacagtcagaacaggaagccgcatccgcccactctgtcgcagtttgacatggagatggaggcccagaggccagagccatgcaagagatggcatttaccctgcttcagaagatcgccggcctcctcgccgccatcgccagcctgccgtcgcccgcgcgcgctcgtcgacagctacacgaccggtgccgcggccagcgacagggcgacaggatgcccgtgcgcgccgcgcgccgcggccgacgtcaccgacctggagctggaggcgcgcgatcgacctcgccgcgtacgacgtggtcttcctggcggcggccgcggggaaggttgagggcgccgtacgtggcgcacctgggatgggaaaccacatggcggctggtcgatagtggacgtggagcccgcgcgggccgggttcgacgtgctggccgtgtgccactacccccgacggcgcgacgcgcgcgatgaccaactccatcatcctcgcgcgcaaggcggcggacgatgagccacgacggaagaaaacagtcagtcgataaattgagggggtgttgatcccacctcaaaatttaaacacatgcatgaaatatttaatatagacttaaaaaaatagctaattgcacagattacgactaatttgtgagacgaatcttttaagcctaattgttccatgatttgacaatataatgctacagtaaatatttactaatgacggattaattaggcttaataaattcgtctcgcggtttactaattgattctataattagtttttttattagtgtctgaataccccaatcgataccctatataatacccgatgtagcatgtcaaaattttatatcctaggtctaaacacccccttattagtagagcattttgtataactcgatattgggctatggatgtggactggagcttcaattcaaccagggcgtgcttgactctactgtcacgtgctattcgattgcttcaactctctcttgacttggaaggacgtgtccaagtgataaaacgattggagcatatcaattttgctatttgctcaccaagatgcgtgaattccactttttttttcactctgataaggattcacctcaatgttttttttcaaaaaattttaaatactccattggatgagaggagttttgtaagaaaaggagggtattaattaatgaatgcaaaagtcatacaaaaatcatgtggtacaaaggaacccaaattcataacgttctttgttgctcttaatctataccatatgttgttggatctagcagttacaaattctttccgtaagaggcgacacctaaaatagcaaaacgcatgtagtaaccttttagataatgtgttgatcttaggttatatcggcccaatcatatgaaaaagctcataggagtagggagtgtattcatatgggtaagtttgtgtgcgtgtaggtgagcatctgtgttagtaccgtgtttcttaataaaaagattgcttcctccgtatttaaaatatatgggattgttgaatttatttagtcaaacttttaaaactttgataaatggaaaatatacaaatcatatgggtagatttttcttcataagtatttctacattattatataattatattagatattatcgttatttactaatggaaggatagttgtcaaagttgcagactaacatcagataaaatcaagagtattactttgataaatggaaaatatacaaatcatatgggtagatttttcttcataagtatttctacattattatataattatattagatattatcgttatttactaatgaaaggatagttgtcaaagttgcagactaaaatcagataaaatcaacagtactggaagtaaggtctcattttgacaaggaggtaacaaagggtggttattccagttggtgcacgcctaacttataccaaagtcaggcgtccatgtggacaaaaattgagtccatatatccagcgtgtactcttaggataagaatattgcctgttattagttaaagatgacagcctaagttcatatgtaattgttcagttcaaggaaaaacgtaatcagagtgaagatttatacgacagtagtatactatataggagtatgtacaaagaaacacgaggaaattttatttttagaaattaaaacatcaccaaacagtggtaccgataatatccaacaaaatgcaacatcattatccaaacaaaaagaagaaaaatgctataccaccatcttaaaataaaacaaaaatagcgaaacaaaacgaagtgctctagtctagtctagttctatggactaggaaagtatagatggacacggcgattcccatctccgtgtgctcgttttctccctccttttctcctactattcccatcccagtatcccacccattctctgttccgtacttccgttgcacccatggctcccacgaagcagaggagtcagccgcgcgcggccaggcgcgtcgcggacggcgacggcggcggaggtggaggtccaagaacccaccaagacaccgtgttcgcgccggcgacgacgaaccgagatcttccgcgccatcccggtgcgcgatcgatcgacggcgagcacgacacgtgaatacgtgaccctgccacggggggcgcgcgggcgagacgcctcctccgggaagctgagcgcggcggcgtcgtagccgcgcgcgtcctcggccgccgccccacttgcccccacagccgtcacctgaccccgcgctccgccgccgccgccgcatccggcgccaccactgatccctcgcttgcttcgccgggcgtgactacctcgcactgtacacgtaaaacatcggtagacgacacagcagctagccacgtacgtacgtgagcatccgttcgctagccgggagcaacgcgggagaggaaacggaggtacccgcgccgcggagacgaccccgaccagctcctcctccggcatgacgcggcggcacgaccaacgacggcgcgggcagagcggcgcaccgccgcccaacgtcgcgccacctccacgtccgtcgtcggcaatggcgcgcgtcagcgcagccacgatggccgccgggcccgtctccgccattgaactgctgtgtcccccagtgacaagcactagcacatgaccttgctgaggaaatgataggtgggcgggcgagtccaatttatagtggactttgtcagtgaagccgatgatctatctctatctggtcgggacgggggctcgatcggtgacgcgtggccaacgcgatatggaaaagaaggtagggaaattcgtgcagacacggtggcatccatgagtatggaaaaacatgggcagcgttcccatggaatggaacttccagaagctgctcgtcatttcccagctcggaagtcggggacggatggatttgtcacctcagtgcaattggcagggagtctttcagaagatatgatttttattagtggagcatatggaagcttcctaaatattttgtaggtgtgtcatatattgtctgagctttaataatatatttttggatctttaaatttattcaagatgacatataggtgcaaacctatttcaatccactccgtacaataacgtggcatattattgtgatgtcaaatatgttagtaggacctaaatatcagtcacataaaaaaataaaattcaaaacaagagaggagaaaatgatgttattatttttttaaaataaaactaaaagagagaggagagagagaagtaaaggacagttcttaaattgtttgtacatgactgccatgtaggttccacctatcaccacctgagcaccttcatagtataaccaagtcagccgtccacgtggataaaaattagggagtaatgtactcttatctgaagaactgattttgtaatgatggtcgaaatttatgaaattatccagttcaagaagaatctaaacagaatgaagatgtagacgacacgaggatatatgtacagagaaacacaagtaacttttatttagaaatatattaaaacatcaccaaacagtactaccgataatatcgaacaaaatgcagcagcattatccaagaagaacgaaaagaagaagaaaagaaaaggctacaccaccaacttaaaacaaaataaatactactatgccgaaaaaaaacgaaatgcgagtctaattcaagttctgtggactaggagtacccgggacgacgattcccatctctccagccctttttgtctcgcgcgctattccctcccgttctctgctccgttgcctccatggctcccaccaagcagagtcgtcgccgccgccgcgacggaccgcgatggcggctgcggcggtccgaaggtccacgaacccagaaagcgagcgttcgagatcgacggcggcgagcaggacatgtgatcgacatcgtgaccctgccacgggcgggacacctcctcggggaagttgagcttggcgcggcgcccgcggaagcgtagcgcggcggcgtcgtaggcgcgcgccgcgtcctcggcggtgcggaaggtgcccagccagacgcgcgccgccttcctcgggtccctgatctccgccgcccacttgccccacggtcgccgcctcaccccgcggtacctgcgcgctgtcgccggcgccgccaccaccaccgccgccgccgcctcggccacgtttgccccgccggcgtgatctcccgctgtaaattaaacatcgcagtacacaacacaacataaacacacatcatcatcatccgttccgcgggtcgagcagcacaggatggagcaacaaacagaggtaccggagacgacgccgaccatctcctcctcccgcgcaacgtcgacgcgccgcccgccgcctgttcccgcccgcggcggcacgaccaacgacggcgcgggcggcggcacgcagacgccgccgccgcctccacgcccgccgtcggcaatgacgcgcgtcagcgcagccacgatggccgccgtctccgcggcctcgaagagcgccgccattgccggcggccgcatcgatcaagattatattcaagaacgctgtccgtccagtgggatttcgcgtggcgacgtcgagatcgaacgtgcacttgatcttgctgagggcatgatcgatacgtgggggagggaggcctatttataatggagtttgtgagtgaggcgtgtgtatgatatggccaacgcgataaggaaaagaagcgtatgggcagcgtttccagttccatgcaatggaagaagaagaacttccagaagttgctcgacttttcccagcttggaatgtatggcttcgtgacctcactgcaattggccgggagtgttttcgtgtgctttttcttattatttcactacacctacgacatatttttaagagtaaagttcatcaccgctccctaaacttatattgctgtgtcatcccggtccctaaactcgcaaatcgaccgttcagatccttaaacttgttcgactgtgtcatcccggtccccaaacttgcagatcactcgtttaggtcctccaacttgttcagttgtatcaccccggtccctaaacaggacggtttaaaaactttatattaaaaagtaattcataactttttcatgtgaactctaatgaagacaaattttatatcaaaatggtagccctcgacacgacctacaactttgtagttgataagtttttgaattaaaactgtttagggtcctaaaatattgttgcatgtttatagattttgaaattttaattttaaaattacattttgggacaaaaaatgacttaaaataaaaaaaattcaactacaaagttgtagatcgcgtcgagagctacaagtttgatataaaatttgtcttcattagagttcacatgaaaaaattatgaattatttttaaatataaagtctttagaccgttctatttgacccagatgatattcaaatccaagtttagagaccggggtgacacaactgaacaagttggaggacctaaacgagtgatctgtaagtttagggaccgggatgacacaattgaacaagtttgaggacctgaacggtcaatttgcgagtttagggaccgcgatgacacaacagtacaagtttagggaccggtgatggactttactctatttttaatttcttctaggataatcggtttagtagtacacccccgtcccaaaatatagatattttcagcatagtgacttatctaaatttctacatatatcacctcttatcaaccaatcataaccattcttcattttttttttcatctactttcttttctcagtcagtcataatatttctacaaccattttactttcttaatacacgtgtccaccaaatactagcattttgggatggagaaagtaatatcgagtgatgtcggtcaacgccttgctgatgttcgctccaagcagaagaggaggaaaagtatatcatttttctcgcgcatgctttctaaaccggtaaatggtgtgttttctaaaaaaattctatagaaaaattgctttaaaaatcatataaattaactgtttaaatttaaaataattaatactcgattaatcgtacgctaatggtttacctcgttccatagccttggccactcttaaggttgagtttgattctacgttttctcaatttctactctctcggattctacatgtacatttctcaaactaaattgtatgcattttgcaaacaagttctatacaaaagttgttttgaacaataatactattccaattttaagtgttttttctaatacttaattaattatgtgttaataaatcgctcccttttacatgcatagatgattggaaaccacacatttattgaacacagcctctaagttgttgtttcaagggatagggtaggaaaaaattttcgtggcaactcctatgctaacaatcggactctgagctctataattttcatgtactaaaaatttcacatttaatatttttctaagaaatcaaaatgaggtgtgataaattcaatagcaacttacctagctctaattcggtggtaggcaatgcttaaagccatacttgtgtatgtcaaaggtccaacgagcactattgtacatggctgtatgagttatcaaacgttagcacataattattagcacatgcttaggttttttttttctttccgagcgactaggaattgggcgcttggtagattttaaaaaatagacactccactcctacccactttccctactaggtatgcatagctctaacatattagtctccctacgtcacgcatctgcacattgcatgcatgcaccaaagtatctctccctatctcttcctaattaaacattcttttataagctttaaactatttttctcttaaaccattgaacataccataaattaattattacactattataattattataattaaatatttatatctcacatgattatattttggatgaaaaaatatgtctaaataattaggcgttgtttaactacgattagaaagttgttccatcacttgataaaaatattttatttcactttacaaaatattttagagagatgcagcatttcaaatattgactgcaagaccaataactactatatgaaacatttagccactatataaaacattaaaacattgagtcccaacaatgaaacaatcggaaaaataatatctaaaacatacaatatatttgtaacacttgataatatagtgaaacatttttacatcatgtatgaaaacattagattctaactattgaaacaccataaaatacttgctgaaacatccaaataaaaccatatgcaacacttaaaataatacattaagaaaagctaaatatttttttatcaaaatataaccatgtgtggtcttgtttcaaagatttaattacaacaaatttaatggaccaaacggatcttagattatagaagtaagttaagagaaaaaatagtttgaaatttatcaaaaaggtggttatatatatatggggggaatatgaagggagagaaggaatattgggagagctctacggctcggacgtccggcatcacaccaaaaatcgaacgtctagccaggcaacgagcgcatgtgagaacgaaccctgtcactgtaacgtatgtgcctagctgtttcttttcattctttcctcctctctttaaatatttttttctcttaaattacttatccgatctacgatccgataacaccgttgtattcgttgaaattaaatctttacaataagataccacatgattatattacgtcaaaagaaaaacatgtgtttcaaaccgttagaataaaatgtttcatacgtgatagtgatatgtttcaatatgtgtcttcggtgtgtttcacaaaaatcctgaaactacctgctactactctctctccacctcatgcatgcatacatgcatgtattttagcaagcttcaaaatgatttttcttttaaattacttattcgatcaatgatccgaccacaccattgtattcgttgtaattaaatctttacaacaagatatcgcatgattatattttgataaaagaaaaatatatgttttaatccgttaatacttgttgttttatatgtgacagcgacatgtttcaacgtgtatcttcaccatgtttcataaaatatttaaatgtttcaattgctgattttttttcaccatatataacttaatgtttcacttattggtcaacgctcgcccccgcactgccgctcgcccacgttgctcccgtgccgcgttgcttgcctgcactgcatgtgttgcttgcgctgctgcttgcatactctctctccctctccctcctaatacacgtgcctaatttttcctcaaattttaaatatttttctccaaaattatatatctgatctaaatttcaattataccattaaatttttgcacaaatacttaattatgttgaaatatttttaaatcggacgctacaaatcgtacgtacaatatttttttcaaatatcgaagctgctcctcgtctgtatgcagggacgcgttggagaagcgaggttgtcgcacgcatgcatgcaggagtagagctggttgccaaggtggcctgaggcaccattactttctctctctcttaatcaaactttaaacaaaattttaatctaaaatatatatccaatctataatttataacaagatctcacatgaatatattttgataaaaatatatatgtgctctagaaaaaacaaacttatgttgaactatttaaaaataattctttcatcacttgtggagatgtttcaacccacttcacaaattattccaaagaggtacaacatataaaaagtattgactgcaacaataatcattattacttgaaatattaagtcccgactagtgaaacatttttttatatttagattgaaacatcgaattataattattgttgaaacataaaaaatgtatttgctgaaacatataaaaaaagatagcatgaaatattgctaatgcattagtgaaatatcaacaaagtcttgttggaacatttcagtaacaatgtgtgcaacatttaaaaagtaaaataaaaagtcatcggaatgtagtcatgtgatatcttgttataaagatttaattgtaacgaatccaatgatataattagtttgaaattcggataaatagtttaagagaaaaaatcatttaaattttgaaacatgtttgcatgcatgctccgttggcttgtcagtacacctaaccaattatttcaccatgcacctacactgttgttcttttagattgagacgtccgattttttattcctagccgaacggccaatggtaagtatttccgggaatattgcacactgtacaattgtagtgctagggggcaacatgcagagaatgtatgcagcagtaattataacgaatacaacggcataattatatcataaatcgaataagtagtttaggtaaaatattattttgaaaattggaacaaagtttttttatcacttgggagagaggaagcattcctaacatgtattgatgcttgctgtattgggcattcggatttttttacctcaagctggaggtctgaggagaagacttctccgctatacagtatacactactgcaattttcttttgtctttgacaagaaactagactagcaacacgttgagtgattccctttgagagaaataagattacgaactttctagatggcaaagatattagaactcctcgttatggtattatctttccatcgagaaacttcgtggcggcgctgccgctcatgttcagatggcttttaactactgcagcatgatactaccctctaaaaagcaatggttgtcgtatatcagaaggatatatatatagggggtgtttggttcaatacctaaaacaatcataaaaatgtttggtttattgcatggaaaaacaaaatattttggcgagactagacaaaaattaacttggccaaaatcttaatatcaaaccaaacgacaaactttgctaaaattttcacattataaaatttttaacttgccaataaagttaagaatggctacaatctaggtccatactcgagtagtacactgcactgtcgtcacgactgaatttctagaaagaaaatataaatcaaccacctcttgtggagcatccagaaagttcattgctgtcatcttcctcgatgagaacacaccattccttgtatttattataggttccacgtattattggtttggttttttttgttagatgtaaagacgtttgtgttattggttatcctcacaaactaagcagtagcaattcttcattgtatctggacatatataggcacatttttttaaggatcacccgatcaagatatattgctaaaaatatgctagtatattggagaatacttctgatggaacgtccgatccgaacgaaaagatattgggtgctctcccccacactcccagctgctacgggtgacctggccgctttgtatagtgctaatgtatgatgctcggtatattaacaatgtacgtatgtactaattaatcatttttctatattaaatcatttatcctatcaacgatccgattacaccagtgtattccttacaattaaacatttaattttaaattgtttatatgtgactggccaaaatcttaatatcaaaccaaacaacaaactttgctaaaattttcacattataaaatttttaacttgccaataaagttaagaatggctacaatctaggtccatactcgagcagtacactgcagtgtcgtcacgactgaatttctagaaagaaaatatacatcaacaacctcttgtgaaacatccagaaagttcattactgtcgtcttcctcgatgacaacacactattccttgtatttattataggttccacgtattcttggtttggttttttgttagatgtaaagacgtttgtgttatcggttatcctcatcaaactaagcagtagcaatgcttgattgtatctggacatatatatgcacatttagaaagcaatgcttgattgtatctggacatatacatgcacatttttctaaggatcacccgatcgagatatattgttaaaaatatgctagtacattggagaatacttctgatcgaacgcccgatccgaacgaaaagatattgggtgctctctccacacactcctagctgctacgggtgacctagctgctttgtacagtgctaatgcatgatgctcggtatattaacaatgtacgtatgtactaattaattatttttctatattaaatcatttatcctatcaacgatccgattacaccagtgtatttcttacaattaaacatttaattttaaattgcttatatgtgactgtcatataggtttcatctaacacatgggcgtcatcatagcatagccaagtcagccatccacgtggataaaaattagggaataatgtactcttctctaaagaattgccttattatttagtgatgatggcctaaatttatgaaactatccggttcaagaaaaacctaaacagaatgaagatttagacgacatgagcataaatgtacagagaaacacaaggaacttttatttagaaatatattaaaacatcaccaaacagtgctaccgataatatcaaacaaaatgcagcagcattatccaagaagaacgaaaagaagaagaaaaaaaagctacaccaacatcttaaaacaaaataaatacgtcgaaacaaaacgaaatgctaatctagtctagttatgtggactagagagtacccgggacgacgattcccatctctcccgccctttttgtcccgctattccctcccattatctgctccgttgcttccatggctcccaccaagcagagtcgttgtcgccgccgcgacggaccgcgacggcggcggaggtccgaagatccacgaacccagaaagcgagcgttcgcgatcgatggtggcgagcaggacatgtgatcgacgtcgtgacccttccacgggcggcgcgggcgggacgcctcctcggggaagttgagcttggcgcggcgcccgcggaagcggagcacggcggcgtcgtaggcgcgcgccgcgtcctcggtggtgcggaaggtgcccagccagacgcgcgccgccttcctcgggtccctgatctccgccgcccacttgccccacggccgccgcctcaccccgcggtacctgcgcgctgtcgccggcgccgccaccaccacccccgccgcggccacgcttgcctcgccggtgtgatctcccgctgtaaattaaaacatcgcagcacacaacacaacacaacacatcatcatcatccgttccgggtcgagcagcacaggatggagcaacaaacagaggtaccggagacgacgccgaccatctcctcctcccgcgcaacgtcgacgcgccgcccgccgcccgttcccgccagcggcggcaccaccaacgatggcgcgggcggcggcacgccggcgccgctgcctccacgcccgccgtcggcaatgacgcgcgtcagcgcagccacgatggccgccgtctccgcggcctcgaagagcgccgccattgccggcgaccgcatcgatcgatcaaggcgacgtcgagatcgaacgtgcacttgatcttgctgagggcatgatcgatacgtgggggagggaggcctatttatagtggagtttgtgagtgaggcgtgtgtatgatatggccaacgcgataaggaaaagaagcgtatgggcagcgtttccagttccatgcaatggaaggagaagaacttccagaagttgctcgacttttcccagcttggaaacggacggatcatgtatggcttcctgacctcactgcaattggccgggagtgctttcagaaagtgttttcgtgctgctttttcttattatttcacgacacctacgacatatttttaaattcctctaggtttaccggattattagtactacctccgtcccaaatatagatatttttaggatagtgacttatctcaatttctgcatctatcatcttctattgaccaatcataaccattcttcatttattttttttatttttttcctcaatcaatcataatatttctacaaccatcttttagtactttattaatacacgtgtccaccaaatactggcattttgggatggagaaagtagaatcgagtgacgttggtcaacgccttggtgatgttcgctccaagcagaagaggaaaagtatacaatttttcacgctcatgcttcctaaactggtaaatggtgtgttttttaaaaaaattctatagaaaaattgctttaaaatcatataaattaactatttaaatttataataattaatactcgattattcgtacgctaatggttcacctcgttccatagccttggccactcttaaggctgagtttgattctacgttttctcaatttctactctctcggattctgcacatacatttctcgaactaaatagtatgcttttttgcaaacaatttatatacaaaagttgtttaaaaataatactgctagaattttaagtgttttttttctaatacttaattaattatgtgttaataaatcgatcccttttacatgcatagatgattggaaaccaccacatttgttgaacacagcctaagttgttttttcgagggataggacaggaaaaaaatttcgaggcaattcctaagctaaccattggactctgagctttataattaattttcatgtactaaaaattttacattaaatttgttttctaagaaatcaaaatgaagtggtgataaattcagtagcaacttaactctaatttggtggtatcagggcaatgctcaatttcctactattgattgaaaattagagtttgcactagtgataaataaataaataaataaatatatatatatatatatatatatatatatatatatatatatatatatatatatatatatatatataattattataccacttaactaatattagttgactaaatctcggcaagacccaccacataccatgtcttatacagaaataacctttgggtatagaagaggttccagataaggaaagataaatagagttctacatgaaaacgacaaatattattcggattgtatccatattggtttccctaattctacttggaaaagggaacacctatgggtataaatacaagacccctaggaggagaggggggacggaacaatagatcaagacacaagatcaacatacaagccaacatgcgccaaaacaagacgccggatatcgaattcagagataagcatggctagtcccctccggtgtctacggatactgtcaggagagacatagcgctttctttaatctcgccggatgcggattcgaggaggaaggctaccctgttgtcgactacgagtcaacacttcagaccgccaagtcgacaacagttagataggctaccccaaatattgtattggtatgattatggtgaataagagcaacgaccggcttcggccaacaggagtagggttattacctgacaattcaggggcccgaacctgtataaaaatcctcgtccccatctcttttattataatctcgcatatatactagtaccaacgatccacatactatgcaaataccggaatcgcgacatcaaacgtcgacatatatatatatttgttactttggtcaaacgattaaatgcatactaagaaagtgtatatctaatgtccaacgagcactacggtacatggatgtatccggagaggactatgtgtaagagggagcgtcccatgtccgatggaagggaaaaaaaaatcaaaagctgctgcagtattagcaccatactaattattagcacatactaccccggttgtttttttttcttcccaagcgactagcaatcaggcgcttacgatattttggagaaatggaaacttctctccttcccacttttcctactaggtatgtagagctctaacatattagtctctctatgtcacgcgtctacacattgcatgcatgcaccaaagcatctctcactatctcttcctaaacacttttttacaaactttaaattattttttctcttaaattattgaatgtatttattatagttaaatatttataaaagatctcgcgtgactatattttggataaaaaatatgtctaaataattaggcattgtttaaccacgtttagaaagttgtttcatcatttgataaaaatatttttatttcactttataaaatactttagagagacgcaacatttaaaaatattgactgcaatatcatgaactactatatgaaacattaatccactatatagcattgagtcccaataatgaaacattcaaaaaaaacatttgaaacatgcaatatatttgtagcactttatattattgagaaacattgttaatcatgtatgaaacattaggttctaactgttgaaacatcataaaatacttgctgaaacatataaataaaatcatttgcaacacttaaaataatacattaagaaaagctaaatttattctttatcagaatataaccatgtgtggttttgtttaattacaataaatttaatggagcaaacggatcttagattacataagtaatttaagagaaaaaatagtttgaaatttatcaaagaggtggttatatatagggacaatatatagacagaagggagagaaggaatactgcacgctatagttgtagcgcttgggggcaacatgcagagagtgcatgcgcagcagtaattataatgaatacaatggcattattatattataaatcgaataataagtagtttaggtgaaaaattattttgagaattggtacaaagttgttttatcacttgggacagaggaagcggtcgtaacatgtattgacgcttgctgtattgggcatgcagatttttttttcttaggttggaggactgaggagaagacttctctgctatacactactgcaattttcaattctttttgacaagaaactagactagaaacacgtagagtgattccctttgagagaaacaaggttatgaactttctagatggataagatatattagaagtttagaacacctcgtcattgtaccacctttctatctagaaacttcgtggcggcactgcagctcatgttcagacggctttcaaatactgcagtataatacaaccctctgaaaagcaatggttgtcgtatatcagaaggatatttataggggtgtttggttcaatacctaaaataatcataaaaatatttggtttattacatggcaacaaaaatattttggcaagactagacaaaaattaactttgccaaaatcttaatatcaaacctaacgacaaactttgctaaaattttgtcacgtcccaaaacgaccctaaaatatatcctctaaatggtgcctagaataattaaaatccgtgtgaaagcctccaacaattaaaatgtgcaaagttaaaagtcaaacaaggcttagagggtttttgtatatttcctaaaagcctaaaatgcgtaaataaattttagtggaattttcagagtacaaataataattattaagaaataaacaaagttgaaaaggttttataaaaaaaaactctaaaaagtcccctttccctccctctccctctcgggccggctcggcccatctccctccccctccctctcctctccccgcggcccatccggcctctccccgtgcgcgcgccgctgacgggcgggcccgcccgccaccctcgctgacgggtggggcccacccgtcatccccttcctccggccgctcccgctgcctcgcccgcgccctagcgccaccgccgccgcgaatcccgccgcccccgtcctccccgtgtgcaatcaataggggggaattattccccgtgattccctctccctttccccccattttcccctccctctctcgcgttcaaacgggcggatttgcccccgcaaatctcgccggcaccattgatggagcccgagagcgccgcgccggtttccttcccctccggccgccctctcccccttccacctctatttaaaccctccccgcacctcctccgttcgtttccgcctctcaccgccctttctcctggccggaatcgagctcgcgccgtcgctctctctctccgccgtcgccgccgagttccggtccgccgccgtcgtcgccccggaccacctcccacctcggcgccgcctccttcggcttcgccgcatcctcgccgacctcatccacccctccgtttcgctcgtcgaccgccggagcgccgccgtccccgtcgacccgagccgcgccgccgccttcctccgctccggccgccttttcgtcgtcgccgtcgacctagggtgagcagtggaccgccgcatcgtttcccccctttccctcccttctctcggccgccactccgccgtgcctatggccgccgccggcgaccataggggcgcgggcgcgccgcctcccgccggccgcgccgccgtggccgccttcgggcgcaccgagcggctgccgcgtggggcccggccgtcagccgcccgcgccctcgggtgcggctgacgcgtggggcccacggcaccggccggtgtgagcccgggtgcacccggtccaccgtggaccgtgaggctgccgcgtgggccccactcccgtggacccggtccgcgcgccccctcccctcggctgacgcaataaaccctttttaaattaaaatttaaatgaagaaattcgcaaatattcatttaaagagcatataaacttcaaataaccataacttggccatttgaactcggaattggaccgttcaagtctctaatttttccttaagaagtcaagaacccatttttgtgctttgttcctgcttgttatatggagtttattagagtaaaagccttttcttttccgttggtcgtgtagacgctgcagcttcggaagatccgctcttcgtggaagttgaagccgacggttgggaaagcgagcaaggcaagtcacatcatccttgaacatattgaatcccagtttataaaattatgttgatttaaattattgcattatcgctttatttaaattcccgcgttatcactgttttatctagccatgcctatttacctttgttatgaccttattattgttattgttattatttccttgttcaccctagaataaacaaaaccccaactagtgggcactctactcatggtactactagtatgattttagttagatgcttcgccgcttaattaggcaacattaggtggttttacaactctagactttgggatattcatatcacctggacactatagaattgtcggattattgtggaattggattcacacctccccctctcttcaaaatcctcaaaatggttttaggctgggctcggggtgcatggttttgatagtagcacctcggccatataaggaccggtcttcgggcctctgttgcaaagcactaccgtacttccacatgtctagtgggtaaggcttagtttgtggctcagtctggttataaataaaagtacacggatggagatggacgaagtcgggggtcgatggacatctctaggacaaatgaaggctacacgagctgcggcccggtagtcgagatgtcatggcacagggccggtgtcctgctgctaggggctcagtcctgcctacctgtcccgggggttccggccgtaggtggggttgggtcggtactcttgtctatggctaggatgggttggaaactatgtcacgtcttccgtccgtataccgtggtggtatgcggcacgtggttacacgtgaggaagatgtgtcttgtgggtaaagatgtacacctctgatcagagtataatctattcgaatagccgcgccctcggttatgggcaagcctagcaatgtacccaagttagtgttttaattcttaaaacctgcttaacaactaaaatgtggaatggttggcctgggttggcttgggacgagctgggacccagggtcgggttgccagttcggtctgaatcatcgtaggccttgggttaaggcaggttcgtgtgggttcacggccttgattaataatatggtatagctctggaatcgtgtttacaaaatagctttgagcaactaagtgtcttttaatgctgtttacttcaaaccctaaccctttatattataacccccttgtactcccttgcatttatcttgcacttgtgggtgtgtcttgttgagtacggtggttgtactcagtcttgctcaatttttcccaaacccagaagaggagcccctggaagatgaaggctttggtgtctagctcgtgcctgccgtcaagcgcctgtggtcgtcgccctagtcttccgctgtttctcgtttgtctttgtgtgtgctgggccttcgccgcccatgtaataaattaactatttacgcttccgcttgataaactctgaaatgtatcaacttttggtgtaccttacctcctggaacaaggaataatacacgcacgtaaggaacgcctgttgggttaattccggtcgtgacaaattttgacattataaatttttagcttgtcaataaagttaagcatggctacaatccaggtccatacttgagtagtacactacagtatcgtcacgactgaatttctagaaataaaatatacttcaacctcttgtggggcatctagaaagttcattaatgtcgccttccctccatgagaacacaccattccttgtatttatataggttccatgtattcttgatttggtttctggttagacttaaaaacgtttgtgttatcagttatcctcatcaaactaagcagtggcattgcttcattgtatccggagatatactgctaaaaatatgctagtagattggagaatacttcggattgaacgcctgatctgaatgaaaagatatcaggcgccctcccccacactcccggctgctacgggtgacctagatgctttgtatagtgctaatgcatgatgctcgatatattaacaatgtacatatgtactaattaatcatttttttatcttaaatcgtttatcctatcaacgatccgattacactagtgtattcctcacaattaaacatttacaacaagatctcacacgtttatattttgatgaaaaaaattgaacgttgtttcaccacatatagaaaataattgatcacttggtcaggtttttcaattcactgtataaaatatatcagagagatgcaacatttctcaaatactaactgcaacaccagcaaacattgtatgaaacattaagtttcaacgagtaaacacatggaaaaaacatataaaagatacaatatatcccaaaaactttatattgttaaaacatttttatatcatgttcgaaacattaagttttaaaatacttactgaaagattcctagtataccacatgtaacatttgcaaaataattagtgtagcatcatataaatattagttgaaacttttaacaaaaaccatgtgtatatttaaaaatatgcataaaaagctaaacaaaaacattgaaataaaaccatgtgtggtctgattgtaaagatttaattacaataaatttaatggtacaattggattattagttggagaagtaatttaagagaaaaagtagtttgaaatttgctaaaaaaaagacttaaaccaacttgtaactatcacggtttattcttgtacgttatgcgtgcatgtagactttgattatcagctgcatgcagcttacctagtcagctgcatgtaaagcttccatgatcgtaggcatgtgcatacttatggcttacctagtcagaggagtggtgctcgatttttagctaaacttacaagcgcgtctgatatgtagttgcgaatacttatatattgcattgtactcgagagtgtgtggcttcagtaataaatattttttggtcaaattcatagtgagtgaattacatatgctttgactgctaattcatgtattgtatattttgagattagcagcctctccatccacatattgagggcctggttgaaaacattgaatttttttccacttgtaaaatatttacaagtgtacttttacgtcaccaccttctaccaccaagaatacaccgtttttttgacaaattggtccttgcagaaaacttatttcgaaactagtccataccaaaaactatatccagaaatagaccgtcggctcagcgccaaagcggttggcgctgaggttgttcttatctgcgccaacgggactggcgctgacatcgcgccagcgtggcgggcgaggcgcgatgtggcagggcctcagcgctaatgcacttggcgctgacaccttgcacaccctaaatagaccgatgtgcggcaatgaattaacggtgttgctcgtggtgcaacggtaagtttatttcttgctatatcttaggactagggttcgaatcccaggtcagccatttttgtttttttttaaaatcatcaatctacgtgcgtacatattaatgatgatctccattttcgtttttgtcttcaaatcttcaatgtactttttattgtttaaattaatttttattaaaatgaaatatcacatttagtacaaatttaaaaagtagaagaatggattaaaaaaagtttagagacaacttttaaaagaaatatcacttttttataaaaaagaaattagaagaatggatttaaaaaaacttgagttttttttttaaataaacaacaagttgagaactaagggtaagttttattctaaaatgtcacgtgtttttttaaaattaaaacaacacttgagcttgtaaaagaaatatcacttttttaaaaaatatttaaaaggaataacacatttagtacatatttaaaaataaaagaatggacttaaaaatacctgagctttgaaaaagttaaaaccgcaagttgagaactaagtaaaaaaaaaagtttagtaaaaacataaaggagagggttcgaaccctggtcactgtaacgccacctttcaaatacctaccactgagctaagccaaacctaattgttgcttttgcttttgcttttatttagccagtataaaggccagcgccgctgtagaacatatattctgatatttatatatatatatatatatatatttaaaaaacagagagcatcattaatcatttatatgtactaatgtacgcacgtagattgaagatttgaagaaaaaaaaaaagaacgaacaaggctgccgtgatagggagtcaaaccatggtgctagggtacacaagcaaatggtcataccattgcaccacaagtgcattgcttattaatggccgcgcatccttttaattagcctgtacaaggggtcagcgccaaatacattggcgctgaggccctgccacgtcgcgtctcgccagccacgctggcgcgatgtcagcgccagtcccattggcgctgatatgaacaacctcagcgccaaagaggttggcgctgagccgacggccaatttctagatatagtttttggtatggactagtttcgaaataagttttctataaggatcaatttgtcaaaaaaacggaagaatacaaccaccccacacccagttgattgcaaaagaaaccgtacatactacagcaatgttattataagagtacttttaccatcctaaatttatcatccttaagaaatacagaatgtattatatttcgtagtttaaaatttggtatcttcgggtatcaggtattaggtacctcaagtgatggcacctacatatactttctcaaagactgtcattttcttattataaacaaatcatactgacaaaaatatctcgtacggacgcatatatcattcacaagcaaaaagttctacaggctccaagtctatatgctcaagcaacgggacagcataagtgcatgggaacaaaagtttgaatgcatgaacaatataatgcatgagttgaagcacatttcttgcatcaatccaaactagacatgaatactaatcttctgtcactgtaactaatatatattttcagtaaccagcatatatactaatgttgtgttgggctcctggtgcctgccgaaaattcagcacacaaggattcactgaatcatgggaaatcaagaagccctggttcttgcacccttcactcactaattctttggtagtgagcccgcaccttgtttgcaatctttgttcctcatcacatttcccaagtttctttgattgttcagtgacgcaacattgtctctatataagtcatctcctgttgctaacacaacaagtttctttgcatggaatttgttatttttacctttttaatttttaaataaaaccctccaaaaaaatatttctaaaatctcaacctttttctccacgccaccctgtttggtatagcgcagcaacactgccggcagttggcatggctagtgtggcaaaacagtgatgccacaccataatagagtggtgtggccaaaaattgctgctacgctaggcattattgtatcatttagctacaccaatccagttgcatggtcaaaaggtttagttttgaaaataagttttagaagagtttagttttaaattaaattcaaaaaattcaaaataaaatcctttggatggatatatttttttcatgagttaacaactcatcatcacatttatggctcatgttatggacgatggttgcacactagtcagttttgagattgaaatttgcatctttaggattgcagtagactgctttgcggagttgcgtagacaggcatggtgaagattaagtcatgtctgagttggacttgttccaacccaaggttataaatatatttgccccgggcctttgtaatctaacaacaattcagtaataactttttcagcacatcgtcgctctagtttagcattcgacgagttcttgttttctagtttagtatcagtttcgatctccggcgagaaagtaagttcaatcaacttcgcttgtatcagccccggctagtactttctcgattgagcccgataaactaatttggtttttgcatgtgttgcctatctgatgtatcggttttttcttcgactgctttgccatcttaattagattcaatatatcaaccactctgtttgatatctattggctcatttaaatctttcaagcttatcatcaatcccgtactgtctcggttaaatccgatctactaaattgtgtttactagacagatttgctcaatccaacaggtgttattcattgtatcatcgaagttccagctgatgagttacaaaaattatcaataattaaattgcttcactagctagctgtcaggggtaacataattgattaattactaattttattgtcttcaattctatactgtttcggattggtccggtccaacaaaaatggttttaataagaattaggttatttgcaattatattatatctaaatcttggtcaatgttttcttaatttattttttatacataaactccatcggttatagccgttgattcaagatttcatcatcatcggctggacacacaatactatttcagccctacggacgattggccccatgatctatttttttgttttctatcttgttagttgcaaaatcaaactaactgacacgctctgaacccaattgataggacttgcgcaacagttcagcaaatctctaaggactccgtgtatgtgcgatgaattatgcatcaacatctactcaatgaagaaaaatatttagtgcctttagtaaaagaagagcgaaaaaactgcaaatcgggtgtccgattatccccaaaaattgggcgttatttgaccacctatataaatatacttcaactacttaaaaaaggtgaaacactgtcaaatataaaggattgaaacatttcaatcacacacggaatatagaacttcagctattgaaacattaacatgtcagcaagaattgaagacaaaaatatgaaatactttaaatatacctagtacaaaacatttcgattcaacgcaagaaacattagaacacattgactcaaacatcaagaaacacaaaaaaaaacaatatagatattgcttccctctcttcccaatcaataggaaactgttttaaacactcgggtgggcgtccacccgtttcttgcatgtcatctagtaaatggttatgaaaaatttttaaaaaatttgacatgataggttaatatatatgtaatatatcacttcacaaacatgcaacttcatatttaatttctacaagttgttacaacttacaacttgtagaagtcgaatttaaatttgcatgtttatgaagtgatatattacatttttttgaattattttaataattatttagttggcatgtaagaaacagctagacgtccatccgagagattagaatccatctttatatattaatctatcttgtatttttttaaattattttaataattatttagttgacatgtaagaaacagctagacgtccatggagagagtagaatctatcttccccaatcgaccatcttatggtgacagcgaatcggccggcctcctccacgtgacaggctgatggccctcatggcagtcactacagccaagacgagcagactctgtgtctctcctgacttacatcttagatatatgtatcgttgctggtatatgtatctcttctcaacatggtcgttcgagagaacggcaagcaaggtggcttccacgatagagaaagagggagaggaagagtgaagagaggaagaacatcctggagggagaagagaggcggcggagggagcaccgctgccggatccgcccgcggtgaccgccaccgccgacggatccaccttcggacgaagccgatgccgtcgtcgccgtcgacgctgccgttgagagggtgccgtcgctgtcgaggccgacggggagagggagagagagagggggggaaggacgaccgtcgccgtcgtctccaccgcaccccgccgtcgctgcgccgtgcaggcgagacaggaaggagagccaccgccgccaccgccgctagtgtggggaagggcgccaccgccgctcgccgtgagggaagccgcggccactagcgtggggaaagggtgccgccgccaccgccgctcgccgtgggggaaggcggcgccgccgccacagctagcgtgggggaagggcgccgtctccgccgcacctcgccgtcgccgcgctgtgccggcgagaagggagggagaagggaagggaagcggcgccggtagtgggagaggcggccagctgggaggagggggagaggcgggagatggggagagggagtggcgccgccggaggggaggggaggagaagcggtgccggtggggagagggggagaggcggccggctcggctgggggggtaggggggagggggtgggttagggttttcataaggccgtgggccgaccggcaagggatggaaataagtctagtttaggtccctcaggccgaagaaaaagagaagttcaattttagtacttcattttttcagaagcattacaattatagttattgaatgtgtttattttgaagcaaactaaaagaaagtattttctttcttttttcaattaaataattgttaaatgttgtttctattattaaaattagcaattaagctctgaaaattccaataaaatttcaaatagcgtaactaatcatggagaagttaattaaatcaaatttaaccatgtcattttatttctcacacttgctttacttataaatttatttaattatacacatacctacttaaaaataccaaatatttcagcgaatttgtattttaattaattgcatatttttctattatgtacgcttcccgttgctacacatgggcacttttgctaaaccaaacaacacttttggtcaatatatacacacttcgtaatcacccggtgcaacgcacgggcacttttgctagtatcaatatatgcaagtggagagaagaagagaacaaaaatatgtattagtcgatggttttgtaggagagagatgaatagtgtgatatgatgagtaaatgagaatggggataagcatgtgtatttcgaatgtaaagcgtgtggggatgaagcgggtgggggacatagcctgaattttttccgaagcatcggacgtacgtacgggctagagcttttttttttaaaaaaagagagagataaggagataaggacaatagatactagctactccctctgtccctaaagataaagaatttcccggatttttttcgaagcatcggacgtacatacgggatagagctattttttttttaaaaaaagaaagggagataaggagataaaggacgatagatacggggacggctgattagcgacggccgcgcgcggtcagtccagccccttatgtctactattagtagtatactatccttcctctttatactactatactagtattttatactactactagtactatactatgtgtatgtgtgtgtatatatatacataaaaaaaagtttgtattagcacgtatacaaattttgtatacgcgcgtatacaaagtttgtatacgtgtatatattgtatacgtacatacaatccaaaaaatacacgtatataaagtttgtatacgtgtatacaaagtttgtatatttacatatataaagtttgcatacatatgtattagaaaaattgaaaaagatacggaagaaaaaaacagaaaaaaaaaagaaaccgtaaacggaaaatatacggaaggaaaaacagaaaaaaaaaggaaacgtacgcaaaaaaaaaatgcgccgtccaccgccctcctctccgcgcacgatgcgtgtccagtcgcgcgcgggagggggcgtgcgattgaccgcgtattagcagttttgcgatagatactagttacttccaccgtccctaaatataagagattttggttggatgtgacacatatcctagtacaacaaatctaaaaaaatattcaaattcgttgtactagacggtcacatccaatcaaaatctgttaattatatttaagtacggatggagtaatactatttctgctcgggcagtcaagatgactaaggcaatgctcaaggtttcattgaacctaggatgtaacgaggttctagaaacgcgttggcagcaagcagattcctagctagctcgatccatcgaccatgcgttttacggatcgccaggagccagccagcaactacccggccccgtgtgtagccttcaccgtacgcgcgtgcgctgcgtccagaaaggcgaccgatcgatcgactgagtggccggccaagtgctactcccccgtcttatattttaaaatataagtatttttaagactctgatatgatatccgatatactactttaacaacaactagttgtatattatgatagtttatttaatgataaatttaataacatcaattttatatgattgatcttttttattgtttttcatagaatagtcaaagcgttactattttaggtcggagggagtagctgctaatgagatttgacttatgagtaagtagaaaggtcgagggtcggcgtggcgtcaagcaaagcagcagcaaactgttcgatccatcggtggtgatgctgacttcgctctatcggaggtgtggtcgatgagcttgttaacaagaaaagatttttagaacaccacagaatgagttagatctgtttttgtcaaggtcgacagggagcttgactaattaagttattctccctaagtctcaaaataagttcatatttttacctcattcatgcatataccaacaaaaaaccaaaaaactaaaatgttctcacttttttttcaaacattaatgcatttactctcactttatctaatactaatacacaattcatcctctgctttcacaaattccgattcaattattgcttaaagataaacctgttttggaacaaacaagaaagataaaaaaacaaagttattttaggatggtactctctctatttcttaattgatgatgtggttacctttttagtatgacgtttgactattcatcttatttaaaaaaattatataaatattatttaattttgttataacttgttttaacattaaaaaaaacttttaagtataactcatagtttaccatatctataatacttttaagttactataatagtcaataacgtcggaattgtatatgatattcaataaaacaatttacagcttcggacagaattttcacgatagtaattgattcctccatccgtctctaaatataacaatttctagcattcaatttgtccaaaaatataacttctccacattccttctctcctcaaccaatcacaacctttcaccattcaaattcttctactttcttgtcttaaccaattataaccatctcccattcgattatacctattttcttaatacacgtttctaaccctataactcctataactcttgcgcctagttgaatcacacccattaacctaaaaaccgggtataacccgtcccctaacttccaaaaccgttgtaaatcgacccctggatggtttcggaggtagtttcatcatacatggcacctacatggcgggttgacttagtcttcatcccatatggcatcaacgtggcgcttacatggcactaaaataaaaataaaaataaattttgtcagtcaccttagtcctccctctttatcctcggcggcgagtgacatggagagagtgacggggaagtgggacggtggggcggcgggagctcggcgagagcagcaggacaaagggagcggagagagagcagaggtgaggaagcctcaccgcggcctcctctcctccctcccttccgccgcctcccctcatgcgcctctctgccgccgcctcatcctcgtcctcgccttcttggcctcgccgctacctcctctcctccctccccatcaacacccccctcccatgcccctcctctaccgcctcatccccgtcctcgcctcctccggactcacggccacctcctctcctccctccctgccgccacctcattcccgcactcgccgcctcaggcctcctctcctccctccccgccgccccgatcatgtatccagagtatgatggcgtggaagccgtcctggttagccttgtcgaggccccgcacggcacggaagtggcacactaccttccctcccgcgcccctccgccactgcctcatccccgccctcgcctcctccggcctcgccgccacctcctctcccctttccctaccgccccagttgagtatctagagcacggcacacgtggaagccgtcccgatcagccttgccgaggaccgcatggtgttgaggtggcacattagcttgagcgctgtgcgtgggtcacgggctgaggcagcatcgaggagatcgcctggatggcattggagtcgtcggtgctcaacgcagaggcgtccggcacggccgtgcttacggaagaggggtcctgctcaacgtcgccgccttttcgcggtggtgctcaagttcggcatctcgaggagctcggcgacgggtgagaacgacgacgacaaggaggagaaggccatctgatgtcaccccgccacaacattgggtgtcctactgacaatgggttccacctgatgactcagctagtaaacggcgtcaaagatgccacatgggacaaaaccgcctcgcaaaccacccgatgagtcagtttccaatggttttgtgagttggaggacggttttataccctgttttgcacttgagggatgtgattcaaccagggaatgagtagagaggcaaagtacacttattcccctcccgaattttttgtatttttagattttttttttttaatatttacagaaatattatagcgccgaaaaaatttgcaaaactagaccctgccgcccttcgcaagggcggcaagccgacgtggcacacgccgcgctggacggcgcgggacggccgtcctcctgccctcttgccgccctggcaaagggcggcaggacccccttgccgcccttacagagggcggcaggcctggccgcctataaagcccagccggctcctttgaggagcccattccctcctaacctctccacatcaaaaaaaaaaaaaaggagaaggggaggagaagaaaagaagaggcgaagccctgccggtttcaaacttcgatttcaggtaatattcgtagattatatacgtgactaaatatatgatgttaactaggatatcacttgtatttttgtagaactttggttggataaatgcattgtatgaaatagagttttacctgtggtactatataaatatatattgttagatgtaggcagggtttcaaaaaccgccgggggcccggttaccgccacccggcggtacggcggttaccggcggtaaacgcggtaaccgcgcaaaaccgcgacaaatttacaaatcgaaattagaattcaaaaattcgggcaaaccgcgcggtttggcgcggttaccgcgcggtttgacgcggtaaccgcgcggtttggcgcggttaccgcgcgatgtgtaatgggtcggacagtaacgggccggcccatttttttttctttttccaattttcaaatttattctccgttttgctctcaaatttgaataaatattactcttttttgagaaatttcttcaccataaaacactataaatcaagcactaccttcaccattttttttgatttttttcttttttttgtaaatttttgaatttggacgaatgttattaaaccgtaccgcgcggtacgggttaccgtacccccgcggtacgggcggtaaccgcggtaaccgcgcggttaccggcggttttagtaaccctggatgtaggtaacttagtagatctgtagtatttgtagttattaggtttgtagttttaaatgttgttgagtaacattgcaatagaatatataaaaatttaggtacgttgcaaagaagatattacactgtagtcgtttattatgtaaaataacggcctagtaattaactttgcagatatgtccagtaaacttatatttcaactataccatggtcaaggaaacgtccgttatgggccaactggggtagatctgtcagaatttattgtaacagcaaggggaattgataggccagccgagaggagtgtaccttctataaaaaaatggttgatgcggggcttgggagttgatccacagactagtgacattacaatctatgttgtagtaagtcgggcaacagagggtttttattgggaactaatgccggttcaaaactctgggatgtggagatggtatgtggagaatgcattgcaacgtgggtggcctctagctatggttccgtatgttcatccgaaggatccaagtgtacagatgaacatggatgatggcgaggggccaagtgcagaagtgaatgagattgaagtggatcaggtcaacgcaccagaggaagatggagtagctccagtagtagctccagtaggcatgcaacctggtggagtggctgacgagggggagactgtgggtgccattgtggacgaaatggaaaaagaggatcgtgacaacgagcgtgtcgaggaagatgattcgtcagatgatgacgagaacaatattaatccagctgaatgggctagtgatgatttttctggtttggtcatctctgaaggggaaaatgtgagatgggagtacaaggaaaacgagattatcgagggagcgaggtatggtaatggagaagacatgaaggaggcggtgaagcattatgcagtgtcacttcatagggagttttgggttgccaagtctaaccggacacaatatgaagttaggtgtgttaatgaaaaagatgggtgtccgtggagagtgcacgcctataaggggaaatggaaggactactggacagtgtcggtcattacgaaacatacttgttatctacctggtgttcaaaaataccacaggaacattacatgtgcatttgttgcatctgagatgtatgcgcatgtcgtggacaatctggcatatgaaccgaagtcaataatccgacatatcgaacagactttcaagtatacaattagctatgccaaggcgtggagggccaaacagaaaataatagagatgagatttggaacttatgaagcctcatatgacaatttgccacgtctgctatctgttatccaacaaagaaaccctgggacctcttgtgcactcaagacattcccctcaattgaacatcctggcaagactgtgctgcaaagagcgttcttagctctacatgcatgcaagatggcattcgtgcactgtcgtccagttctttgtattgatggcacatttttgaccgggaagtatcggggccagatagtaacggcaattggggtagatgggaacaatcaggtattgctgttggcatttgcttttgtcgagagcgagaacaccgacagctggtactggttcctccatctggttaagacagaagttgttggtatgaggcccaatgtgtgtctaatacatgacaggcacgccggtatgcttcgagcgatagaagagttaaagtttgggagtatggaaagaggataccctggccagtgggaagatgtacaaagcaggtggtgcatgcgtcatatgggagctaatttcttcaagcaatttaagaacaaggagttgatgaacatgttcaagaggctatgcaatcagaaccaggagaaaaaattcaatgagctttggaagagattagatgagttgacaggcaaatgtagtgaccagcgtgcaacaagaccagcggccgctgtacctgaccctcctcaagcactcggagctctcccaacagacagtgtaacattggttagaagaactggggagcaaattcgaaaattttctcagtggattgagaatgagccaaaagagaaatgggctaagacttatgacacaggtggtgctagatatggtataatgacaacaaatttggcggaagtttacaactgggtgatgcgcggtgtccgtggactcccactagttggtatagtggagttcattttacatgggacatgcaagtatttcagggagcggttccaagcagtttttccctctatgccgaacaacaacattttatttggaactttcatggagaaaaaactaacggagtggcgtgcaaaggccatgaaacatcgagctctagtgcaaggtacccaacaacacaggtttgaggtactctgccaagacaaggcaggcaggggtatctaccgcaagagagtaaagcaggagtgcgttctcaaagacgacggcacatgtcactgctcctgtagaaagccgacgctgctccacaggccatgcacccatgtcatttccgcggcatctgagtgtggcatccaagatgcagtatatgtgtcacaatacttctccaagcaagcaatatatcacacatggagtggcgagatttttggcttcggtgtagctggggagttcacaaagattaacgatccgataatctatattcctgacccaacgaaactccgagacaaggcgggacggaggaagactcggcgcatccgcaacgatatggatgagtcggaggcaggcagggtgaagcggtgcagcaaatgcgatgaacgtggccacacctacaagtattgtcctaaagacaaggaaaaaccaagtgcggcggaggcaggtctatcaggatcagcagcagatggagctcgccctacgggtgaaggcactacttcaaggcgaccccgtcctagacgttctcgtggaacgaccggttacgtggtgtagttcgtgtgttgtatgttggcaaaaggctttgcttgtaatttcgttcgaacttatcgatatgttcgcattgtgttgtgttgcgaaccacttgttagacttccgcatgtaatgtctttatgttttacggcttgtaattttgttttatgttatttcattctcgttacgtgcctttgtgtaacgaaagttatgttctcaataatctgcactcttgcatgtctctataagtattcttccgtttcagataacttgtttttacaattatattattaccttcttatttaccctaacatgtaacacgttacttgcagagatggcacatcctgagttgttggatccggcgatagatcagcgccaccggtcgtaccttactgcggtggagggggctcagcttgggacgttccgtccacggtcgtcacgtgagcgacttttggttcacgactccttcgtcgagaggtatggttttactgtgttcacgacaccgggcttaccttactacggtggagggggcttagcaatgtgttcattttaacgtctggtattatttcgctttcgcaggttgcgtgaggccggtctcttaccgttggctcggctagttgaggccgcgaccggcgacgctgacgtgacgagacgttgggacccggacaggtccctcctagcagcgttggtcgaccggtggaggccggagacgcacacttttcacctgccgtgcggtgaggtagcccctaccctgcaggatgtctcttacttgttggggctaccgctcgcgggagacgctgtcgggccagttgacatgggtgtggactggaaggacgagctgacggcacgtttcgcacccgtgcagcgcctaccaggtctaccgctcgagccgttgcagcagcaccgcaacaccgggcctacgaagaggtggctgcttcagttcactgtaagttctttctacctaaactgacgtgtattatgtacgtaacttgtaaagtgcctaacatttcatccaacgcttgcaggttgaccagctaccggaggaggccgacgagtactccttcagccgttgtttggaggcgtacttgttgtggctttttgggtgggtgatgttctgtggtagtcacggacactcggtcgaccggggtctcgtgcactacgccaggagcatcgccgacgccgcggtcggtgaggtgcctcagtggagttggggctccgcgttgctggcggctcagtaccgtggcctctgcgaggcttgtaccaggacggaccctggcgcgatcttcggtgggagccctctcttcatttctctttgggcggctgagaggtttgcgatcggccgcccccttgtggagcaccacccttacgacgcgtcgctgtacgagaacagaccggcggtcgactacccaacgatgggtactctgtggtgccggcgtcaggtacgtcgctagtatttggtaatgttgtcctactattgttaacttcatcctacgtcacactgaccttattgtattgcagcgccgatgggctcacgtgcaggttaggcggtcgtacgcggagtttgtgatggagttcgaccgccttctgccgacggacgtagtgtgggagccctacagtgccttgcttacccacagtcgggcgccgctaggcctgtccacactctgcacgagggaccaggcgtactggatgactacggttccgatggtgttcgacatctgtgtcgagccgcacgcaccttaccgcgtgatgcggcagttcggcttccgtcagtcctttccagtcccgtttccggcgggcgtcacggctgccgttcaccggtaagccgttttactacgatttaatatgttgcattaacatcgggctgtccataataatttgctttgtttgtcgtttgccctaatacaatacattaatttgcaggtactcgcgcaagggtcagcactcagctggtcactggcctgccaagttggggccttttctcgacgactggttgcttgctaccgaggaggtcgtggaccacgcgggagagccacacacggaggagggctatgaggcgtacctacgttggtatcagccacgcacccgtactagagtcacctacgctccgaaggagcaacaggcccacgccgcgagcgccagagacctctacgccaggcaccgcgaccaggacttcgctcgtgcggtgagtaccttgcatcgcaccatcgtctcatcatcctttctgttggacaaaggctacgaatatttacgttgtaattaaccgtgcaggccgttgagtgcaacaggatcgtcgttgatgctacaacggcgatccaacggttaggcgcggggattgaggtgggggcagacgagcacctgtcgacgtacacgcggatacgggactcgatgcgctcggttctccgtgcgctgacctgtcgtgctgccgacgttgctcaggcagacgcagcaccacaggtgcgtccccgaccgactgctcctcgtccagctgcgcacgttcctaggccgacaccccctcccttcggaggtacgtatattcaaggtctatttgtacatcatcaatcaattgatactcaatttatgtgtaagcttacaagtgtcgcgtcgtcgatgtgtaggcttcgctcagcctgggacgacgccgggcgcccactcctggcaggctgcggggtcatcgtcacaggcaggtgtgtcggcctcgctgtctacacagttttggcaggacgccgggagttcgtcacagccgggcggcacgtctgttgcgtcggcctcgctgtctgcgcagttctggcaggacgccgggacttcgtcacagccgcccggcacgtcttggcagggtcctaccgggacttcgtccgagcacgggtgggcttccgccacgcacttcgaccttagtgacttcaacttcccggacattatcggtccctcacagcttggaggcgcaccgccggtgcacacgcaggagcagtcgccctccaccccactcccagaccctcgcgctacccgtgctgtcccaccggatcgcttcacgtactcccaggaccacgtgcgagcacaggcccggaggaccaagcggggtcgcggcgcgagtcacggccagtagagcagacatctctttatttttctttacattcttgtactatatggttgtaaactgaatatgttgttgtttatattcgggactcgcattcctacacttcgctgttacgttttccaaaaacaggagtccctttcgccacatggacgagtactttcggtcgagccgatgcagctttctttattcgcgtgcgatacgactgcggaatggcttctcatgcccttacatgtcacatcagcatatgtccaatcttactttcggcgagaattccgccctctataagggcggaaggccttactccgcccatatatagagtggcagggtactttcggtcgagccgatgcagctttctttattcgcgtgcgatacgactgcggaatggcttctcatgcccttacatgtcacatcagcatatgtccaatcttactttcggcgagaattccgccctctataagggcggaaggccttactccgcccatatatagagtggcagggtactttcggtcgagccgatgcagctttctttattcgcgtgcgatacgactgcggaatggcttctcatgcccttacatgtcacatcagcatatgtccaatcttactttcggcgagaattccgccctctataagggcggaaggccttactccgcccatatatagagtggcagggtacttttggtcgagccgatgcagctttctttattcgcgtgcgatacgactgcggaatgccttctcatgcccttacatgtcacatcagcatatgtccaatcttactttcggcgagaattccgccctctgtaagggcggaaggccttactccgcccatatatagagtggcagggtgctcatttcaaccggtccaaccgaaggaaaaaaaagagaggtgactaagaaggagaagagctgcgaagcattgttgctgtgcttattcgagcgcaggttagtacaatattcggacgtatggttatattttgtgtcgcatactagtgtaattaccatgtatttgaaatttgtgagtagatttgtagcacttagatacggaccctagtttatttgcgagtagatctgtagcactgttagtagttatgttgaaatttgtgagtagatctgtagcacttagaagtgtgaataattttagactagatttgttgtgcacacgtttggtttgtagtagtactacatttgaccgtacaatgagaagtgttaagggtgtttacaatattttatagttgtatttttaaactgtaggatgccaaggcgtggaaaagctaccaactcaaggtaacataaatcgtttttgtgatattatgtgttattcgttgtgcatgaaatgaggaatcctagattaacgggttagggtgtttcatttattgttcacttgtagtcacccgaagactggaaatgccttcaacccattgcctttgcctagcggtgtttcagtgcccatgtgctggtgcggtgatccttgcaaggtagccaagtccgatgaagaggagacgtacatgcagagatactggatgtgtgccaattttgagtttgagccaacacctgagatacgccgcattaacttaatggtgaggaactgatgttttgtaatgattatttggtgtatgaagtagtcttcaacaacttatttggttagtaaacattgcatttgttgtagacccctccaccgctatgtgattttgagcagtggatcgacaccgagatcaagccgcaaaacaaggagcgtttggagtacatgcggcaatgggatgcagagcgcaaggagaagatagagcagagacgcaaggaggaggccgcagaaaaagagcacaaggctgaggcggaaaggaggcgtgttgctgcgtacagggaggagcgggagcggaagcttgagcgtgcgcggcgagcgaaggcagcaatggaggagaaccccgatgcacagaggaagggaaagtggcctcgttgcactcagtagtatgcacgagttggtagttgtatggtgttagggtttaggccgaccttgtttcgctaagtgggtaggaacgtgttccatcggttcgtgggatctccatatctatccactcaacgaatttgcacacccaacgatatgcctatgtaacatgttatcattatgtacgatcaagttagcgttctgcgtattcagaattggtgctagaaattggagcacataagtcatacccgatccatgttgccacattggaagaatccaaatgtggcgctgaggctggcgcgggtggcttcggtgaggcgctgaggcgagagaagataagagagagcgagagagagggaggcgtttttatttggagcggctttagtgagaacggacaccacggttcctttctttttaatatggtatagatacactacaaatttaggtttctgcaaattttcggagctatccgaaagattttcggaattcgagaagcaaaataagattctgtatatttttggagttgtccgaaaatatttttcgaaactttcgaaaatgatagtgtagtcattaagtttatgaaatttttcggagtagttctcttttggaatttttgaaaaacgcgtgtaaactcgggaagttgcagtgcaaatttaaaataaataaaacctaattatcatatactaatatttttttacatgtccttatttacttctcatcttaatctgatcttgctcgatgaccagttgcttctagctagctttggtttggtcatgggacacgtattttttcaggaagtttcttctttctttctttcgaactcaacgttgatccatctagaagatatgcacgtacacgtacacacacataccgtactgatgatgcacagtctgttgccacatgagctaaccagggtttcaattaccgccggggccgcggttaccgcgccccggcggtaagcacggttaccgcacggtaaccgcggtaaccgtgacaaaccgcgacaaaccgtacaaaatttatcaaaaattcaaattatttttcaaatttatttgaatttgacgcggttaccgcggtttaccccttaccgtacccccgcggtaagcgcggtaaccacggtaaccgcgcggtttaccgcggtaattgaaaccctcggcacacccttgcagagggcggcaagccctcggcacaccgcggcccgtgcgcgccgtcaagacgcacacggtgccgtgtgccacgtcggcttgccgccctttcaaagggcggcagggtctagttttgcaaattttttcggcgctataatatttctgtaaatattaaaaaaaaaatctaaaaacaaaaaaaattcctgtactggtctggcctgggcctgaagattagcacgaccgctgatcttaagaactggagtatatatatggcctatggcccaataaaatgtgggactgataccaatttctttagggttcattttgtaaattcaatgaagcatcatacagtattaattaatggatcacgaaaatgtccaacagaaaattcacttgtattaattatttctgcatcaatgcatgggacaatattacattgcgatatcactgataaaattatattaactcccatgcagttaacaactttcaaaacaggcacaaagagctttgccgccccatcttaatttgatctacaattttttaacaaatgtagcaagaaaactcaattaactctaaagaaaacatgcaacactcatacgtgataagtctaaaaacgagcttacgccggtacatacatgcaccatgccaccattagcaggagaatcggatggtatagtatagattccatgcatggccagccgttgtgcagagaggagcagtgaaggaagctaattacagaattagcatacatgttgccgcccttgcagagggcggcaagccctcggcacaccgcggcccgtgcgcgccgtcaagacgcacacggcgccgtgtgccacgtcggcttgccgccctttgaaagggcggcagggtctagttttgcaaattttttcggcgctataatatttctgtaaatattaaaaaaaaatctaaaaacaaaaaaaactcttcccctcccatacccaaaccataccagccctacagcccatggaagatttcaagccgaactattccaacaaacaacggatcaaagcctcgaactgcaggttggaaaaagtacactgaaggtctctcaacttgtcatcgagttacaaaatcattccccaaccataaaaccggatataacgcatcccccaacttacaaaaccagtgtaaattaggtccctcagctgttttaaccccggttttatctgacgtggctgctgagtcagtgtgggacccacgtaaaccccacatgtcaggatgccacgtcatcaagccagcctctcctgtcctctcctttcctcctctctctctcgctcacactctctctcttctctctagactctgggcaggccgaccggcggtggggaggaggtcgtcgacgcgaggaggtccgacagccggccgtcgatggggtggcgacgatgcggcggcggggacaccggagaaggggaagatggcagtagggcaaggcggtgtcggcgagcgcgcggtggtggagagacggcggcggctgcgacacggggcgaggaggtcggacggcccgcccgtcggcgatgcggcggcggcgcgctcgtagtagttgtgcccgacgcccatgagcccgccccaccgctccaggtccccgacggcgaagctcaccgctccatgtgcccacggctgtagctggttcaagcggccgatgctgttgtcgcagcaggcgttgtatgtgaggaccagcagggcgaagaagacgacggcgacggcgacgaggtcctcatcctcgagttgccggcgaggttcacgtacgcggagctagagaaggcgaaagtacctgatttatcagatttttagaccactcgtgaagtcctaaatccatctaaaaatgctcatcatgtactcgtttgtttgactttacttcccatactccctctccttgtgcatcacatgattgtgcatttccttttctgatcgtctctctgctctgctgtgacctgtgacctgtgagttgatctgaccatgttaattgcatacgcgcgcgcaggccgccggatcgagattgcgggacggcgtggcggcgctgccgcgccgtggccagctggttgccggcggggacaacgacaagaacgagcgcgtgtacacgctgtacttggagaccgggtggaaggccggcacagacgcggcggtcgatgtggagcccgcggcggcggacggcagcggcttcgccgtcggggacctggagtggtggggcgggctcatgggcgccgggcacgactactacgtgcgcgccgcggcgccgccgtctctccgccaccgcacgcccaccgacgccgcctcgccctgccgcgccttcatcttctcccgtgtctccgctgccgccgcatcgcctaccggccatcggacttcctcgcgccagcgacctccttcccaccgccggccagcctgaccagagtctagagagaagagtgtgtgtgtgagtgagagagagagggggaggaaaggacaggaagggagaggccggtctgctgacgtggcatcctgacatatggagcccacgtgggtcccacgttgactcagctgccacgtcggataaaaccggggtcaaaaccgctgagggacctagtttgcactggttttgtaaattggggatgtgatgtatccggttttgcggttgggggatgattttgtaactcgatgacaagttgagggaccttcggtgtactttttccactgcaggtttgcaaacggcccgatgactcagctaatggccgtggcgcccacggcctaccagtctacaggctgacatccgtaattcagaagaaaacgttcactttgagtccctgatcttgacttggagtttggatatcattcctaaactacaatacgcagatataatacatatctcaacttaaaaaccagcgtaaatatagtcccaagataattttgatagcggttttgactgatgtggctcgacgtgttgacttcatcttcctacgacgtggcatgcgggacccacgtgtaagtggaaaggaaaaatttgaaaattaaaccatgcgccgaggctggctccacgcgtcaaaggcggcggcgggagggggatcctcatcgtgctggtggtagactacgctctgctcgtagcagtggcggatctaaaaaatcgattcgttggtgtcaaaacgcatctatcggtgtcatagtatgcttattatacttagatcatggtgctatagtatatgaataagcagtttcgctatagattttactgaaagtcgtcggtgtcgcctgacaccggtcttataactgtagatctgcccctggctcgtaggatggccacgccgccgtccacgaggacgtcgaggaggagagggagagacgcagtgccagtggacgtacacgactacacgtacggtggctggtggctcaggcgccccttttttttctccacgggccacggccaccgtgtacacaccttctcctcggccgctggctacttcttccgttgctgctccaccggcggcttggacgacgacaacgacgccgatggcggcccaatggtcacaacttccgcccgctcgatcatgtccaccgggaccatgcacctacgctgccggtgatcgattaccgttaacgtgctctagagtcgatcgatctcggtcttgtcaacacctgatcaatatgttcatttgcttccttgtgtcatggatgtgctgataccttggaggtcggccggagacggcctgcaaaaccattggacatggaccggatgccagagagagctcagctcacgacagtgccgcgtgcatgccggtgcccggccggtgcttgctagtacaaatgttgttagaactaattaatcttgttgtatataggattatatggtgtcttacttagtttaataaagtcatatgtttagcgtacgtagttgcatgagagctcatgcatgtgtagctgggaacgtgataggttcacgttgtgcctgctgtgaatgggatcgagttgatagcttcttgcgtgcggatatataggaaggaagtggagtcctggtcatgggagatcatgcgtaatttgcatgagactcgatcggcgaaagcatttagaccggcagtgcatcatcagctgggcttctaaaaccatatatataccactcatttggttaattgtgtgcgtgttgcaatacagaaagctaaaaagatcgacgtgcgtcgtcgccggcgtttgtcgtcgaaatctcgtgtgtttgattcaaatctgcatgtgtgttgtgctcatacttgccgtgagtttgatcctgcttggctttatgctgctggctttctgcaggtggtatatgccgcgcgcatgcatctgttaccggcctctgctcccaagctggtgtggggaaggacggccgaggggagctgccggtgaggggaagacgaagacgtgctccttctccgccttgtcaccaccagagttcactctatcggttcaggggtttctatcggggggtcaccgaaatcccgaaatttcggtccgaaatttcagaaattttgaacaaaatttagttgaatttgaacaaatgttatccaaattcatgaaaaaattgaaaaattcaaaaatttcggccgaattaatatcgtatcggggggtcaccgaaatttcggcaatttcggcccgaaattttggaaatttcggcccgaaatttccaaccctggtcaccaccgccggcgtccttccacttcaccactgaccgtcggccgccggcctcctcctcactgcttgccgcctggtgagatggaaacatggggaagaggagagacatgtgaagagaacctgacatgcgggtccatgctgactcaaggtcgttgactcgcgtcaaattgtcatgtgaaacaaaccacttgctatattgtcatagcatccgttttaattgatagttgaatgacccgttgtatctgatatttcggtctaaagatgaaaattaacttaatcctaattcagatgatcaaacctgcgtatgtaatcttactaagggcatgttcaatcttcgagacaccatcttatgtcatttttttccatgttatctagagacagcatatgagacatgatcgatgtacgatgagttgtctgtcgcaatgtatgtatttcgtctctttttaggagggaggcatatcaaattagcatgccttgaaaatagaagactcaatcgctaaaatgtataaatagactatattttcttttataattttgatagaaataaatatagtataatcatatagtgtaattacatcgtaacttgcatgtaactacgatacaacctctacataactttcaataatccccgcggtaacacgatatttttacaaagtggaggtcgtcaggtcaaatcaccttacctgttcagccattgtgatttttttctttccggcttgtataaatcttgaaacaaatttaatgattcaaaattatgtaaaacttgcatacaagttatattatagttacatgtaagttacaatgtaactacactacaattatactatatttacatttgaaaaaattttaataaaaaattatcgataaatatatagtaaaatcaatgttgaaatcaccgtctataaccatcgttgctaggtctgtttcaacaacaaaatgtatcgatgttttctctctcttaatggtcgggcaaaattcaatgtggcatagtattactgacggcagagaaaacccattgcacattgccctaagaaaaatagaacagcgaaatgggctaattggttgacgtgctcattttgcataagctatgataactcgaaaaggtctggctagcaaattttggaaccacactttagctactatgaagaaaacttcgcacacttttctgtgtcatttatacgtgggagctatatcttgaaaaagaaaacttgtcacaaaatgaagaacaaaccaaataggcaacaaacttgatcaaacttatctgaggtgtgacataatgatgatgcaacttgtgacatcgaaccaagcagccctcaaaaactcacctttccaactaatcaaatgcaaaaggtgagaatgtgatatcatcgtttgttcaaaggcctgaagaattatgcccaaatgcaagaaaatttgtcctctaatttacagaatgacacttggctggccagacagctaacacaagccgctgatataaagttccttttaatattaattaacttcgtcttgcttggacctcatgagcttcagctataagcctctccagatatatatagctttctgcatcgaaacggcagatgcaaacccagcttttaatctatcagttatgccccaagccaaatgcatgagctgtgcttggcttgcaagaccctttttattttctgctgctcggtgaaacactccaaactgaagtttggtgacatttagaaaaaaagaaagtaactgataaatagctggatcgagttcatgaagtgttcctagttcagctggctagtaaactacaaactgagtttgtaatcttgcagttgcaggttgttgctcaaagtgttcatagttcagataatgctggaaataaatatgaatatgttagtacatacacgccacctagctacttaattacttttccaaaaggtaagtttattaattactgctgcatttcttccttatatagataacatgttgctctaatcatcaatcactcagtcagttagaaaacaagggccagaatatcagtttgcatatatgaaaaggtggtatataataagtatgtagtaatacttattgatgcattgtgttatctattcactggtcaatcagactggtgttcatgcatcattcagtaaatgttattcttgcaataattcaatttctgaccgaattagggtgtgtttagttcacgtcaaaattggaagtttggttgaaattggaacgatgtgacggaaaaattgaaagtttgtgtgtgtaggaaagttttgatgtgatggaaaagttggaagtttgaagaagaagtttggatctaaactctgccttagcaaagctgtgaatcccattgatctgccaacattatagcttgaaccagacgttacacccttttctcctctctagaaaatgtttttttagctttggatgcatcttataaagagaaacaaaatcacctaaaaaaagaaccttttgtaattttgtcatggtagcaactaacaagagcataagtagtgaggttaggggactcatatctctccgactctccctcccaaaacgcattttcgacatcaaagcctccacaagtccaagagccttttgcgtcgtccatggcgcaagagggcacgagcagcaacgcacccccggctgctgcctccatgggctccggcgacggcgacaacaaggagggcaccggcgagtccggcaacaaccagctgctgcttccggcgatcgccgccagcgccgacaagggtaagggcgtcgtcgccgggaccgggaacgtcgacgccaaaggtaagaccacggcgatggcgccggcggccagcagcacgaatgctcctaacaaccagggcggcggcggcggcggcggcgggcgcagccgcgagaggatgcacatcttcgccgagcgcgagcggcggaggaagatcaagaacatgttcaccgacctgcgcgacctcgtccccagcctcaccaacaaggtttaaactcgcagtagctacatcgatcgtcagtgcggcgacgtgatggatgagatgatgtttcaggcggacaaggcgaccatcgtcggggaggccatcagcttcatcaggagcctggaggagacggtggccgacctggagcgccgcaagagggagaggaacagcctcgccgcgcggtgcgcacgcctcggcctcggcgggtcctcctcctcgtccgcgccaccgccaccgccaccccccgccgccgccgacgacaccgccgccgtcatgccgcccgcgccggcggtgccgccacctgatgccgccgcggtcaccgcggggccagagcctgcgccggcgccggcgccggggacgttgatggtgtggtcggggccgagcgtggtgctgaacctgtgcggcggcgaccaggccttcatcaacgtgtccgtggcgaggcgccccggcgtgctcaccatgatcgtggacgtgctggagaggcactccatcgacgtcgtcacggcgcagatcgcgtccgacctgtcccggtccctgttcaccatccacaccagcgtgagtattcctctcccctcctgttttttcgggcgctttttttttttggtccaaacatgtttagttttcaaaaaacttgcaacggtaggaaaaatagaatttctttgaggtactggcctacggcccgggcgttgcaacggaaaacaaaattgagtttctagcttattaaatcgattaatcatcacatatttagtctaagaaatactctgatttttcttattaaacaagtatatatgtgattttgaaatttggggggatgaaatagcgaaatggaagagggcttgttgaaaagtgatgtaatagtatagaatgtgcgaccagatgttagtggtatgggtggtgtgagaatagacaccaccactactaacattcaggatttacaaaaccgtgcagatatcgcggttatcatgtgcggtaaccttctcagtttttaaaaccatggtatagctcgcggtaatcacacggttttcacgaaaccgtggggtggcggtaaccttacccaaaacggtttggtgaaccctgttaacattttaagtagtatagatatgtattggatatatatcttagttttgtcgtggtgcacgcgtacctttgtagggaccatcctcatgtgattggtatatttctggaacattcgctaacatattcaataaagtatatcaccttaagtacgtgtggaattttcgcgtacctttgtagggaccatcctcatacgattggtacatttccggaacatttgctaacatattcaataaagcatatcaccttaagtacgtgtggaattttcacgtacctttatagggatcatcgtcatgcaattggtggattttcagaacatttgctaacatcttcaataaaacatatcaccttaagtatgtgtggaattgtcgtgtacctttgtagggaccatcctcatgtgattggtggatttccggaacatttgctaacatcttcaataaagcatatcaccttaactaaagtatagagcccataaaaacttgctttgttgtgtggtgtcatgtggtgcgcatctttgtttggatcatcctcttgtgagagttaaaactttgtcgtactaggacttattctagctactctagcgtacaccactagcgcgtaacggtctagccataattaattaacagagccggtacaaaatttgctttgtcgtggagcgttcgtccaaccctaattgcagtgtcctatgtatctttgtatagagcattctcttatcggagttagaacttatcgtgcaatctattcaatagcatatactctctccggtttcattttaattaacgttttaaacaaggttatggttaaacttttataactttgactatcaataactttaaaaatacttagtataaagaaactagaacaacatatatagattggtatttcaaaacactataataaaagtaaacatatatttatttatggcaaaacacttaaattttgcaaaattataatggcatggttccaattttccctttatttattgtatatattataatagaaaaataaagtcaaacatatattttgtagaccgtgtcattgtccaaaacatcaattaaaatgaaaccagaggaagcaccacaagtgcgtaacggtctagacacaattaatgaatataatccgtacaaaccagctttgtcgtgcggtgcgcatgtatgatgttagttgttgtctacatagtgcgtatatgtaccatcctctagtgggagttagaacttatcatgcgataacttgttctggctagttattttgatggtgtataccgccctcgtaatggtttagtaaccagaaacaattatggcttgtgcaatgtaccatcgagccattttattcctatttaagagaaaaaaaatgatatttaatagtcgaattattgaaaaaacaccttatatataaaacttgctataataggaatggctaggagtacttatcacttggtaacaccatttaaaccagtgaaaaaatctcgaaccaaaacataatggctttcttttatggtaaacaaaagagggagtacgaagcatggggtatgatttacacagttcgttcaaaacgcaatctagctaattccctttactttgttaatcgtgttttctgttttgttttgttggatggttacgcttagttttacatgttcaacttaaaatattagccagcttaaaattcctggaaaagtagtgaaaagcagctgaatttgatatccttattttacattgcaattcttgaatcctaacaagtgcatcgatctactggcctgttctatatatatgtacaggtggacagagagcgtggtatgttcatggacactgcgacggctgaagagatctaccaactggctgtctcggagataatggtatggctccacagcgagtgatatgatcatcgtcatggtgcaactagcaaaaggggatttgagctgttaactctcagttaatttgagcgttataatacatcagacttagcttcatgtggtgcgtgtcgcgtttgcagtgaaccgtttgtcttgatttgcaaattaagtatcagaatattgtgttgtaacaaggcaccatagggattgtcttttaagtttttggtgaaacatttcggcagttcatgctctgccgtcgttgatatcattttatttattgattctaataattaagggtgtcttcttctccatgttgaatgtggctgaatatatagataaatgatttcggataattatgagagtacaaataaattaattaactattataaaataaagtagtggaattgcatatatcatcctgctatactgatgacttattatcagcacggttgattattactgtcaataattatgagctaacccgtggcatggtccataggcatagctagctagctaggtggcattgtgggctatggaaccacctaaaaatttgatcgagattaaaaatatagcatgcgtgtgctagttaatataataaaaattatacagtggaccactcttttaattgacgtttacatatagatgaaccacctttactctagttacgcaagcatggttcttaagctcatgctgactagcatataaccataattatcgggattatttctcttccaacagaggacacccacacgattcatccacaacctacttatagttatatgtgcctgtgatacccaaacgtgtgcatggacgtacatgcaattataatcatatctatgcataattatttttatgatacttaaatatatgataattatttgagagtacaaataaataaattaactagtttatcatccttctatagggcataggtgattactaccatgaactacatataaaccaaatactgcaatgaccatttttttctacatgcactactacaaaaacctcatataacctcatatagtggcacttttgtagaggcgttttgtaacttgcttctaagatcagaagttttatagtgtagagacactttatagaggcactttaaaaatgggataagtccattttacacccctcaactcttgtcattgtctaaaattcgcccccaaactctaaaaccgggtatccaacaccccctaactattaaaaccgttcaatttacaccttttttatattttaggcggttttggcctacgtgtaactgagatggcagtccaatcagcaaaaagtatatataaaaaatgtgggaccatctttcagtcaaccttcctcctttttttctctcttcctttctcgatctgtccaatctcggcgcatggagaaggtgatgttcctctctcgatctctactctcccctctctctctctcgatgcagggaggcgaaggcggcgacctaggaagaagcggctcggagtggctacgacgagctctgtcggaggcgatgacgctcggggagattgtaggatcgagatgtcgactagaggaggggggtgaataggcgatttaaaattaaattacacataatcaaaactaacctaagttgctaggctcggtgagggacaagactaactaagcaactaagttatgttttgcaatcctagggtgaaagtggctcaagtatatcactagaaaagtaaatcacacttcctaagtctagtttagcaatcctagggtgaaatgatctctagtatgtctctagaaatgtaaattgcacaaatgtaaatgcaacaactaaatgagacaaggagacaagagatttttcaccgaggttcgaaaactcgccggtttcctactccccgttgaggcgagcccaactccaccgctcaaccacgaagccaccgcacgcccccttcgtcaaggggtgggcaaggcgggagccggcccacgaagaggactacccaagcctcgatcactagggtagttcttccttcactccgaaggtggtgaactccaaaccactcacaaaccggcaccgggcctcctccataatcttctcggagaggtcaccgggcaactcctccacaagccgtctaggaggcggcaacctccaagagtaacaagcaatgacccgacgtggagatgctcaatcaagtgccacactagctctacaaatggaagcaatgcacttgactcttggctaaataaccctctaacacactagatggatgaacacaaagctcaagtgggtgtgagagaggtgcaaggggtgtatgcaattgaattgggtgccaagagagtccccttactgctggagggggagtatttatactcccaccaaccaaaactagccgttgggggcgaaatcccccaactcggtgctctgtcggtctgaccggaggtatgttgctggtcagaccgtgctactctacaacggctagttttctagcagttgtagggctgtcattgggccccactgcctaggccggtcagaccgacatggggtgggcggtcagaccggcctctgctcggtcagaccgccatcagctcggtctaacagaatatggctccgtcggctcgggatcggctatcccagagcatgctatcccggccatatggccggccggtcagaccggccaacacacactggtcagaccggcccaaacagggcggtcagaccggcgatgccggccggtcagaccagcactcggccagcggtcagaccggtcctggcaaggccacacagagaacgcacaacttgaaatatggggagagtctaaaagtgagcacaagtctaaatgcataatgatctaatgtggcaatttaaaatcatctcttttgctaggtcattacccctcttaatagtacggcaaagctataaataaactagcacaattttgatcgcccaacgcctcgatcaatttcgaatgaaaacacaagtttaccgtcttctcttcctttagctttgtgccgtcaatttttaatccataggtagacatccatgcgcacacataatgtgaacctaacttaaagatatagctcaaaagaacggttagtccacaattagcgcttgtcattaattaccaaaattaacaccgggggcgtagatgcttcaatctccccctttttggtaattgatgacaaacaccacaaatatatataatcaaacatagagcacatggacatatattgcaatgacaatcaaaagctccccctaaacatgtgcataacaatcacaactagcaaatatggagtctatgcacatttcaatttcacatttcaacatgtcacaaacacataagcaatatttcaatgtgaacttcaagaaatgttcatccatgagcataagatggtcacatatatatcaatatcacatacaccatccatcatcgcacaagttcacatcacttaaccattcaaaacacatgagtcacaaatcatcctaaaaagggctcacaaataaacataggctattacaagaccacgaagggtccaaatgatatagagttcaacaaaacaataaagaacacacaatatagagtaatggtcttcattcttgaggaggagaaggaggacgcgccgaagaggaaggatgaggagcatcacggcggagatgatatacaaaagcatgggtgctctccaacatttggactcgagaattcaagacacccactctagtttgcaaccttcccaccgaagtattcaagttgccaacatcagtgcacaagccacgaacatcctcatgcaatgcttcatgcccagtagacaagcgttggatgctttcacttagggtattaatagccccaagtaccgggtttaagtattcattgggttgcattccaaagtaggcatattgtggatggaagaaggcacttggatcatacccatgaggaggaggcggggctgcacttgagcttgcgccttgatctaacgttggttggcgcacacgaggagctctaggagtggagagttggagacgaggcttgtactctttgtgttcttttaagttgttaccaatttgtcccaacttgcattgaatcaacctcattatgtagagggcatagtaaactccttgtccaatagtccccttggaaatggctatctccttcatcataaggttgatgacatcaaaccgacgatcatccatgatggcatcaatgacatgccatgcaacgccgcgtatgtcatcattgttaccacatcttgggagaatggtggccctcactatgcggttgattacacttgggatagccctcaaaccccccacctttccatatgtgtgccttcccccttcttcatagaactgagaaaagtaatcaatcatgaaggggttgtggttgtgctcatcatggaggtcatccccgttgttgaagcaaatgtgcaagagctccttgaattcacggcggttgatagagcaccgaagggtccccgacatccacttcatagcatcacaatcgccggacacccacacggtggcataaaattgccgaatgagatcttcatcaaagggttgcttcatggtgacaatcctatcaatcccaacggcccagaacatctcttgcaaatccacaaactccggtgtctcaccaatgtgcctccaagaaatccacttgtgttcggtgaaggctttgttggcatatacttgctcatatacggatttttggaaccgtgtatggaatcttggatcattgcaatcattaggcctccggaattgatcagatgacgaaggatagtgtattgctgggcattcctcaaattgagcacaaaatggatggtgggatcgagaggactcccatcatcacttgcctcatcatcctcaccatcgccactgccattgacatcaccaccatcactgccattgtcatcaccacttacttccacctcatccccctcaacattttccatattttcatcctcactttgaacatatcatctccgcttgattcctcattctcactgatgggattgggcgtgggctcacgacgaccatggcgagtgtggggaggcatagctgagaaacaaggaacaagggatatatgagcaacgattttagaagacactaggttaggcggaaggaggttgtatgctgctgtcaggggcggtcaaactgagtaccatagccggtcagaccgatggcaaggcagcggtcagaccgccggtcaaaccggcggcatgcgcccggtcagaccgccctatgggctggtcaggccgccactaacaggagcaaaaacaaccccctgaaaccatcacacaaatgactctaaaaaagaatttgctacatcaagattgcacatgatttgagcatggttatcaaggtgaagggctatttcattaagattggaacaacaacccataaccctaggttgaaatagatcgatttgagagcaatgcacaagagggagagtgatttaccggttgaaggagttgaatcacaccaagaaactaccctctattggtgcaaaacgaagaacacctcttccttcacctagggttccatgccatggatcaaaaactcaatcaaaacacaaatcaatccatggaatagagagaggaagcggaggagaatcacttatggtgtaaccggagtgattttaatggttgaaccggatggatttggtggaggggagtggctagggtttgggagaggagagaggatgagttttttcgagttggggaagaagagaactgaatggggatgaggttgggttgggtggagaagaaaggaggaagaaaggacaaagtcctgggcccaccatcccaggccggtcagactggccatatgcggtcagaccgcctccaccaggccggtcagaccgcgcatatagcgccggtcagaccgcctggcccccagccgactgtgcacagcccttacacagttcggctacccccacacaataaaattcaaaaaaaaaattgatttttggagcaatttttgaaatatgtgagtttaaatattgctaaccatccataatatttgaagattatgatgatttgcaactaaactcacttaagtgctaggaggtaaccttttatggtctataggggtttttgggcgaatttgattttcaaaccacttttgaaatatttaatttttgaaataggtttgaataccaaaaacatttcaaatcttcttctctaccaactttgttttgaaacttttctcaaattccttctcaatctcaatttggggataaatctcattttggccaaaactaagaatctatctagtttcttcaatagagggccaaaagggcattttcattcaaaaatcatttttcttgcaatgtgaggcttcgaaaacatataggaaccttttgaaacattttccaagatatagttttcaaattacatttattttgcaaaagttttgacttatgttgacttgggcattttgaaagcactactagcacttgtagttgatttgctcacatataaaaggaagtagagcacatgcaagagtgcaaaacactcccttaatgtgacatgctccattttcgcaaagaagaaccaaatggcaataagtccaaagcataagagcaaatatacacaatgcaaaagaagcaaccatggtgcacaatgtcaagccacatttgagaaatctatgacatttaattcattcctcaatttgcaaaagcgggtttcatcaaaaggcatggtaaagatgtcggctagttggtccttggttcttatgtggctaatgactatgtcactcttggcaacatggtctcttaggaagtggtggcgaatgtcaatatgcttggttctagaatgttggaccgagttattggctatctttatggcactatcattgtcacataggagtggggttttggtgaaggatatgctatagtccaacaaggtttgtttcatccaaagcaattgggcacaacaactacccgccgaaacatattccgcctcggcggtagagagggctacggaggtttgtttcttggatgaccatgacacaagggatctaccaagcatttggcaactaccggatgtgttctttctatccactttgcaaccggcataatccgaatcggaatagccaacaagcttaaacttagcaccttttgggtaacacaagccaatagttgaggaatgctttaaatatcttagaatccttttcacggccactaagtgacactccttaggagcggcttgaaaccgtgcacaaatgcaaacactaaacatgatatccggcctagatgcggtaaggtaaagcaagctacctatcatggaacgagatgtgcgttggttgccataggtgtcttgatgggcttcgcatcctccaagccaaacatcttgagtagatccttgatgtacttggtttggcttacgatttgatatacttggtttggctcacgtaccaaagagctatgaattatatatatatcatgatttgatcggctggttggttgaagtctatattgatgatgtggttgttaagtctaaagaaatagaagaccacatagccgatttgagaaaggtttttgagagaaccgggaaatatggcctgaagatgaacccgacaaagtgtgcttttggtgtatcggctggccagtttttgggatttcttgttcatgagagagggatcgaggtggctcaaaggagtgttaatgcgatcaagaagattcagcctccggagaacaagacagaattacaagaaatgatcggcaagataaattttgttagaaggtttatttcaaatttatctggcaggttagagccttttacaccattgttaagattgaaagccgatcaacagtttacttggggggcagagcaacagaaggctttggatagtattaaggaatatcttagctctcctccagttttgattcctccacagaaaggaataccttttagattatatctgtcggccggtgagaagtcaattggctcagtcctgattcaggagcttgaaggaaaagaaagagttgtattctatttaagtcgtcggctcttagatgcagaaactagatattcccctgtggagaagttgtgcttatgcttatatttttcatgtacaaggttgaggcattatctattgtccaatgagtgcactgtcatatgcaaggccgatgtggtcaagtacatgttatcggctccaattttgaaaggaagggttggaaagtggatattttccttaactgagtttgatcttcggtatgagtcaccaaaggcgatcaaagggcaagctgtagctgattttattgtagaacatcgtaatgattcaatcggctcggttgagattgtgccatagattttattctttgatgggtcagtgtgtactcatggttgtggcattggcttggttataatttcccctggggggcaagttttgaatttgcttacactattacaccatatacgactaataatcaagctgagtatgaggcagttcttaacgggttgcagttacttaaggaagttgaagccgatgctattgaaattatgggggattttttgctagtaatcagtcaattggcgggggaatatgagtgcaagaatgatacattaatggtttataatgagaagtgccaagaactaatgaaggaatttcggctggttactttgaagcatgtatctcgagaacaaaacactgaagctaatgatttggcccaaggggcatcggggtataagccgatgatcaaagatgttgaggttgagtttgcctcgataacagccgatgattggagatatgatgtgcatcaatatctgcagaatccatctcaatcggcttctcggaaattgagatataaagcgttgaagtatactttgttggatgatgaactctattatcggacgattgacaaaagaaaatctctcaatctttcataccaagccctaggagcttgttttaaaccataaagagcttttgatagtttataaacatggttaggatttttaggatctttaaaaccgggaggttgttcaacaaagacaagttcggcaatttcaccatttagaaaaacacttttcacatcctgttaacgactaaatttggtaatatcagtgtcggagataaagactagattgaagcggaatcgaagacgaagatcattacggaaatagagcgagaatcggccacaatccgaatcggctacggtcaggatcggtgcagttcgagtcagacagggctagtcgatacaaccgattccgacaatacgacttggtgtacaacatcgggttgagttaatgtgcttcacgtgagttgccacacacggatttaatcctaagaaggcaattgtatctattaattaggatattttatgtaatttccttagagatatgtttgggcaaaagtctaccgtaaagacttatggtatcttagagtttgttagagataagagtcgtgcccgatatggacatggtttgtaattttcgggtataaatagaccccgaaccccatgtaatcaatgaacacacacgttcaatacaatctcggcgcatcgccaccctttttgcttttgttttatttcgacgagttcttgcttttgggttgagctgcatcggtttcgatcttcaacaagaggtaaaacttgttatggcggcttgcgttctcaggattagtgcttccatccttatgacactctaatcttgtttatgtaattcatcgagttatcatatatcttacataatctctagcaatgtcactatctaacctacaatcggctaacatctgatagtagagggcagccgattaggttagacattgatgttgacttagattatataggatatctaccactctatgaaacttccagcggcttgattgtctagatattgttcttcttttcatacttaatgctgcatcagttgagtttgatctattaagtcgtgcttagaacatcaatctctagcctgccttctggttgccgattagggtagcatcgaggtttcagccgatcttatctgatttaactacatttgctttatgtgttttattaacatgttaaatcttccctttatgtcaagatcttgttgcatctaagtatattaagcttctgtttggtatattctgcttgttttaatatcttaacatagagttgtatcggagtattagccgatacatgctagatctatctgatcggctacgctatgaacatatatagtcttgttgttaatatgtatttcgatctaagtgatttatactgtctcggcacggcgaccaatctatcccaatcacttgatttaagtatatatcaacaccagaattatatattgttaatatctacagcctatcgagtagatttagttctttattatctatttataactgttgatcgatttacatatgacattggctcgaagataaataatatgtcatcagcatctagccgatcggctatcatttatggatttaaccacggtttctttgtctttatttcttgttgattgcaggatcaaatcaactagcacgctagcatactcaaaggcgagttttggacctgcactggagttaagcagatctcccaggccttgtgtttttcatcaacacatccatttgaaatagttttatatcaaagcataatgcaaatgcaagaaggatgcgaataacctctagtcttgccacgggggcaacagtttccccaaagtccaaaccttcaacttgtgtgaaaccttgcgccaccaatcttgccttgtttctcaccaccaacccgttctcatcttgtttgttcctaaagacccactttgtccctatgacattgtggtctttaggtctttcaaccaaagtccacaccttgtttcttgcaaagttgttgagctcttcatgcatagaattcatccaatccggatcacaaagagctcatctacatgttttggctcaagacaagaaacaaacgagtaatgttcacaaatcgaagcaacacgagatcgagtttgaacacccttactaatgtcacccgacgcttgatcaattgggtgatccttggaaagagcggtgtgtatccttggtgacataggtggatcttgtgccttctcctcctccacttcaacttgagcttgacttggcgaagcggaagtagatggctcatcttgagtggaggtggatggcttgtcttccacttcaataggcttgacatctccaatagacatgttcttcatagctctcatcaagccttcatcacctacatcatccaaattctcgtgcccctcttgggagccattagtttcatcaaattgaacatcggcggtttctttcacaatacctttgttcttgttgtagacccgggtatttgaggcataacctagaagaaacccttcatcacaccgactttcaaatttggttagtctaacatccttttagtaaatataacacttgcaaccaaaaactcgaaaataggcaacatttggcttcctcccaacaattagctcataggaagtctttttcaaaagacgatgcaaataaagcctattggttgcatggcaagcagtgtttatggcttccacccaaaaggaatcggaaacaccatattcattaagcatagtccttgccatctcaatcaatgtacgatttttcctctccactacaccattttgttgaggtgagtaggtagcggaaagttcgtgtttaataccaagatcatcacaatagtcctcgatattggtattcttaaactcggaaccatcgtcacttctaattttcaaaagagtgcaattaaattcattttgggccctttttgcaaactttttgaaaagctcggcaacaatagacttgtcatgcaaaaaaacacccaagtatagcgagaataatcatcaacaatcacaagacggtgactattaccaccaatgctcttataggttgttgggccaaacaaatccatatgcaagagctccaatggtctagatgtggacatgatactcttagtaggataagaacatgcaacttgcttgccggcttgacaagcactacaaagcttatctttctcaaacttcacatctttcaagcccacaactagatcacgttttgaaagtttgctcaattgattcatgccaacatgggctagcctcctatgccaaagccaacccaatgaagtttttgcaactagacaagttttcaaatttacttcactagaattgaaatcaaccaaataaagatttccatatctaaaacctttgaacacacaagacttgtcaagaaaactagaaacaataacctcttgcgggaagaaagcacatgataagccaagatcacaaatttgagcaaccgaaagcaaattgaaatttagagatttaacaagagagacattatcaattgacaaatcattggagatagcaattttacctaatctaattacctttcctttgctattgtctccaaatatcactttctcttgttctttccctcctacttcaaatgtggtgaacataaccctatcaccggtcatgtgttgaatgcacccactatcaagcacccaatggctcccaccggtgcggtagttcacctacaaaagaagatcaagctcttttaggtacccaaacatatttgggtccttggaggttagagatcaaagctttggacacccaaatggtattctttttaccaccaagtataggggaacccacatatctagcaacaatactaccatcatgagccttcctaagcatataatgagaatcaaacatgcatgtcttagaaagcttaccaccggggcaatcattcaccaaatgcccaacctcacgacacttggagcaatacttaccattgctcttgacaaaacgagtggcacggtgagaaggtttcttacccttctttagaatgaatccaagtccctccttgctaaggatgcatcgttgctcactcaaaatcttgtcaagagtgttcttacccttgaagcacctctccaaactcttgttgagcttggccacttgctccttaagctcattgttctcaacaacaagtgagacatcacaaatcgaaacacaagagctagagctaggcatatccacaagatcatcacaagaggtagaaatgctagatgatgcaacatgagcaatatagcaagtagcactatcatcaagcaaatcacaagatatgccaacatcaatgcgagctccatgttgagtagtggaaaggaggttgtcatgagcttccttaagcttctcatgagaaatgatgagtctctcatgagaggtctttagctcctcatacaagatctccaaagaagcatgatccttctttagggctttgaacttgcaatctccttctcactataagcatggagctcctcaaacatactcacaagctcatcataggaaacatcatcacaattatcatcactctcactatcactaagagatgttaccttagaggagccctttgccatgagacaaagtggagcgaagagtgatggagcctccttgatggtaacaacggccatcttcttcttcttggagcttgcatcatcaccaccttcttcctcagacctggatgaggctaagctctcctcatttgagtcccattccccgatgaaggcctcaatcttcttcctttccttcttgagcttcttcatgagctcgtagcctccactcttcttcttggatgacttgtctccatcatcatccttggaagggcacttggaagcaaagtgtcccttctcaccacactcaaagcacctcaagttggagagagtcttgttgggtcttctatttcttctcctattggagttggagccccttcctctctcctttctccttcccaagtgatcattgaaccttctagcaaaaagggcaatctcttcctccaagtcctcattggctttattcaccttgcccttgcccttgtcttcaacttcggcttggagagcaatgcacttcttggaaggtgaggcttcctccatctccttcttcaacttgtacatgtcattggtgttgatcttccccaagaggcttgcgggtgtcatccttgacatgtcggagttgatgagcatggtgacaagggtctcatacttctccggtagagccctaagcatcttttgggcaacctcaaaatcggtgtagtttgccccaagccccttaagatcattcacaatgacattgagcctcccatacatgtcattcacactctaatgaggcaacatggagaatgtctcatattggatcttgaggaaatgaagcttggcatccttgtactcgcttgtgccctcatggatctccgccaacttgttctaaatctcatatgcggtctcaaggttgctcactctatcgaattcctcttggctcaaagagttgaacaaagctctgacaccacttataggatcgagacgtcgactagagggggggtgaataggcgatttaaaattaaattacacctaatcaaaactaacctaagttgctacgctcggtgagggacaagactaactaaccaactaagttatgttttgcaatcctagggtgaaagtggctcaagtatatcactaggaaagtaaatcacacttcctaagtctaatttagcaatcctagggtgaaatgatctctagtatgtctctagaaatgtaaattgcacaaatgtaaatgcaacaagtaaatgagacaaggagacaagagatttttcaccaaggttcggaaactcaccggtttcctactccccgttgaggcgagcccaactccaccgctcaaccacgaagccaccgcacgcccccttcgtcaaggggtgggcatggcgggagccggcccacggagaggactacccaagcctcgatcactagggtagttcttccttcactccgaaggtggtgaactccaaatcactcacaaaccggcaccgggcctcctccacaatcttctcagagaggtcaccgggcaactcctctacaagccgtccaggaggcggcaacctccaagagtaacaagcaatgacccggcgtggagatgctcaatcaagtaccacactagctctacaaatggaagcaatgcacttgactcttggctaattaaccctctaacacactagatggatgaacacaaagctcaagtgggtgtgagagaggtgcaaggggtgtatgcaattgaattgggtgccaagagagtccccttgctgctggagggggagtatttatactcccaccaaccaaaactagccattgggggcgaaatcccccaactcagtgctttgccggtctgaccggaggtatgtggccggtcagaccatgctactctacaacggctagtgggctatcattgggccccactgcctaggccagtcaaaccgatatggggtgggcggtcagaccggcctcggctcggtcagaccgccaccagctcggtctgaccgaatacggctccggtggctcaggatcggccatcccagagcatgccatcccggccatatggccggccggtcagacttgccaacacacacaggtcagaccggcgttgatgcggcgattagaccggccctgacatggcggtcagactggcgacgccggccggtcagaccggcactcggccaacggtcagaccggccctggcaaggccacacagagaacgcacaacttgaaatatgggaagactctaaaagtgagtacaagtctaaatgcataatgacctaatgtggcaatttaaaatcatctctttgctaggtcattacccctcttaattgtacggcaaagctataaagaaactagcacaattttgatcgcccaacgcctcaatcaatttcaaatgaaaacacaagtttaccgtcttctcttcctttagctttgtgccgtcaatttttaatccataggtagacatccatgcgcacacataatgtgaacctaacttaaagatatagctcaaaagaacggttagtccacaattagcgcttgtcattaattaccaaaattaacaccgggggcctagatgctttagagatgacggggagccggagctcggtcttgttggcacacggaggaggaggcactcggggagctaggtgggggagccgaagctcgagctcaccggcgcatggaggggaagctcgccagcgcatagaggaggagctcgccggcgcatggatgaggaggcacttggggaggcggctgggagacggagttcgagctcaccggcgcagatctcatgggctcgagctccccagctcccgcctctaggagctccatcttctccatggaattgagctcgccggtggagcttgtgctgcttggggatgtagagttcggcggaggtgacggagcttggggataaggaactcaagctcgacgaagcggcggcggatgcggagcttcagctcgacctcgtcattgaccaaccagtgacggtgctccatagggatgactcctccccgtgtgtgtggatccggcgaggtcggcctcttccgcgcgcggcagcaagctcatgattcctgtaggaggcggcggcgaccttctcggcctctcgctgctccaggcgccacccccatcagatcccgtgccaccgttcaccgcagaatctcccccatctcgtcgtcgatgtcgatggaccacctggggaggggagctcgccgggggtggagggagggagggaggatgacgaggacggagccgacagagggagggagctcaccagcttcttttgcttaatcttatctaaaggggaaaaaagttggatggagatggtctaaccggtgggacccatgctgacatggcacccgaaactagtctaaaaccgctctagggggtaaaatgtctggtattaatagttggaggatgtattatactcggttttatagtttgggagtgtattttaaacaaacataagagttcaagggtgtaaaatggacttttccctttaaaaattgcctagaaaactttcagtttagtttattagattttatgttgtagaggcattctttggtactgcaaaatgagactgatatgtaaaggtattttcttaagacattttaaactatgtagagacactttttagaatgataatgtgtactaaaggactaaatataattaactaaaggcacaaacatataagtaatgacatggacttgagttggttagtgcattgaagataaaaataatttgtccaagagatcgggagttcaaggctttacaaaagcattgaaactattttattctctttttttgaactggtttcatatcatcatatgtttatggtataatttaatgtctctggaaaatgtctctaccatttttgaactggtttcatatcatcatatgtttgtagtataatttaatgtctctagaaaatgtctctaccatttttgaactggtttcttatcatcatctgtttacggtataatttaatctctagaaaatgtctctaccaaatcctacatgttggatcaagaccagatggtcccaatggacacggcatacgtacacgtcgtccatggcaacaacagcgtgttcaaaggcttgcgtatacgtgcgatcactcccagctacaaaagtagttgttttttttgtgaaaacatttcaaaaacgcaagtgcatatatgcacagctttttgttaaacaccaggccaaaaaaagtctaacatgcagtcacctgcaaatgctatagctagacggccctgccacgtgtatggcaagctgaccaagctggtgacgtggcagcattaggatacaaaccatgcctacgtgccagaagatgttgccagccaagcacgacgtacactgcgtgtgtaaaacgtaaagacattttgtattttttcacttcaaagtttttctctttaaagaaaatgcatttcaaagttcaaaccatgttgtgctcactttgccacaaactttatagccagaagatagatgtatacatcttttcttttttgtcactagtgaaatgaatttaaatcagtgagctgtgcatatattggacggttgtgagagctatcgcatgaaccagctatcaaccaggcgttacacgtactaatacagctttgcttgtagcagatgtgttctatcatctttgcaatgcgtgtatcacgatattatcaatttttttgatttaacttgtttatgtgcatttctgtttgcggaaaaaagatttttgaaaagaagctttttttttgtcaataaattcgaggccaaatgctctcacatctcttcacaaaaacatttgatatattttctcttgctcttgcagcctctctcttgctcgctcttgcgtttgcacgtttgcttgatttgccaccatgtctcaggaggagcagcgccatggccgccagctgccgctagctacgagtggcgtcatcaccttcaacggcgtgccgctctcgccgctgaccgccggcgtcgagagcgacggcgacgacgacgtcgtcatcgtcgacgcgtgtaataacgggaagaggaaggtcggtgacggggaagaagaagggcgcggatcccagggcggcgacgacgccgggggcgcgggggcctcctcctcctcctcctcgtcggcggcggcgcgcgccaacaccgtcgtcccagtcccacagagggcggcgcgcggcgccacggcgccaacgccgcgtccggtcgcgccgccgcaggccgggacgtggcccctcccggcgcccgcggcgatgccgccgccgccgccgccacccacgggcgccgcggcggtcgcgccgccgccgtcgctcaagacgtggtcgtggggcgacaacgtcgtggtcagcgtgctcggcaacatcgggaacatgaccgtgcgcgcgccgctgcgccgcaccggcgtgctcgccatggcgtccgccgcgctgaagaggtacaacatcacggcggtgacgtcgctgagcatgttcatgttcatgttctacactatcgtgagtaccatctctccccttcgtttatttagagatagtagtttgcaatgcaagcggctatatatgtatagatccacaagaatgggagcactggatcttggctatggtggtgcatgtgttttataaatagcggatagcgcggacttgccataactaggttgttgctcacgaaacggcttactagaaatgaaagtgtcggaatcttggagcctacgtaatgtaggttgtcattatgcatattttaaattatagcgattgtcctcgtatcggagctagtcttcttattatctgataacttattgtcgttattccgtaacgtatagagtagacttgtcatacttatgatgttgcccgcaaaatggcttactataaatggataagagctgaatcttgcagtctacgtaatataggttgtcgttatgcatatatttaattatagcaattctcttcgtatcagatctagttttctatttttttataacttattatcgttattccgtaacgaatagattggactttccataattaggttcttgctcgaaaaatggttcatttgatatataagaatatgaggatcttggagttcatgatgcatatatttagctatgtgtttgtacttgagtcataaatagttttctaatcatccaagagcctcccttatataggggtgaacccgaaatatgattagatggaagactcatctccttcctccttcagcaacactcttcccaccccctttttctgttttcctttccttctctcattttatcaatagtgatacaatgggataggggtgactctcttccccctgcgccctcagagcatctccagtaatagctcctattttacagcccctaaaaatttaatgggggcttcccccatattctaagtacctaaaaaatacctttaactctagcagcagtcccttttatcgccccttatttcatttcatcttctattttaacatatactttaaagttcaaatctatagttctatactctacgctactcctagtataaaaccataataatccaaccatatttaaattcacaattcaaattcgattcttttaaaaaaaataaaatggaaatacaaatcctagtagcatgtattcatagctcgggtgaaacgagcttctgctgctgtggcgcttccatgcattttctcacatgtgttgatttttcccgtcttctcatccaccaatagaccagctacttctctcacgaagcaacaaccaagcaaagcaacaaaaaagctgcatagcacatcgcatgtatcactttccccattcttccaagtcccacaatcgcagctgctagtgctaccctgctactactttctcaatttcgcagcctgcaacaacacttgaatcatccagtgcctcgacgccatcgcatgactcggccactgggccatgtttttcatcgagttcaggcagagggtgcaggctagaggagactccaggtacagcagacgcgtcggccgggaaggagcgtcgggtagaggaatgcacctgagggatgacacagtaggcagggaggagccgcaccggctagggatgagcactgggcgggggaggtgccggcggaccaagaccattttgttgatgaagaaatgacaaaaataacagttttagatcttgatgagttatacaattttgttgttgatgactttttttagttgaaatcatttagtatttgaaaatgttgtttgaagttgtcatattttcaaatttaaatacaaactgttcaaaaaatgttatatagaaaaataaccaaactaaaagttatagatattgatgagatatacgactttgttgttgatgattttttcagttgaaatcatttagtatttgaaaatattgtttgaagttgtcatattttcaaatttaaattcaaactgttcgaaaaatattatataaaaaaatgaccaaactaaaattgtaaatcttggtaagttatacaactttgttgttgataatttttccatttgaaatcatttactacccgtaaaattattttaactcataaaatgaattattatactgcggttaattatttcgctatagttcaacttacaaatatgaacatttcatataaaaatagaaaaatactcatcagtgacgggctttagtatgcccgatagagattaagtcatctcaatcgggtattagtatatagcccgtcactaatgagtcatctgtgacgggcctagttgttatctcaatcgggccccaactagagcacgtcacggatgacactcatcttaatcggatctaaactatagcccgtcacagatgactcttatctgtgacgggctatagttaatgcccatcacagattatggtcatctgtgatgggccccaacttgaggcccgtttgagatatagaatgttatctcaatcgggcctaaactacggcctgtcactgataggtgtcgtccgtgacgggtctaagttttgagcccatctaacatgtctgtgcaatcatatctcaatcgagcactttttcgccccgattgagatgacttccttgtgacggcccgctatttccagacatattagaggccgtcacagatggaaggatctgagtgtacagcattgccagccaccgcacccgcagctgccgaaacgcaccgaacagccacctccgcccgccggcgccgcagccgagcctcgcacggtcacacggcggctacactcgagggagtggcgctggcagcagtggcttctgctgcgctcggaggaaacgactgctgctgctgcgctcggagagagcggcggctgctctgctgctctctgctgctgcgcttgagagagcggcggcggctgctgctaccctcggagaccaccatcgttgcagcttgctcgtccagcatccaagcctagcatccatccccacctctcttttgactgctgctaccaggaaagacttgcttgtatgtgttgtccgtcttcacaaggtgttggacaaacttgatgttggctatgaatatcggttggatttggctatatctgtgcttttgattcattgtatgtaatatatgtgcttttgcctcatcttcctgttcttcctctcgctaaccggtaccagcggcgcccccacctccaccaccgccctggccggccgccacgccacccggaacagcttgactctccgtgcgccggcgtggccggccgtgtgcttcaaatccaccatgtgcttctcctctcttgctctctgcttggcgatgagaatgtaagatgtgtttaagcccgtgattagtgaagactaactaatctgagccaagggcaacctggtctttaatggtcgtttctctctcctaatcctcccaaaataataaaataatcccacctactttttacaagtccaacagctaattaccagatttttacgatgccctacagcaaatacgttcttacgatgtctcctagctaattacacgtttttctaatatcctgtagaaaattttgccattattatatcgggatcatttcttccaacagacaaaccaacacgatccatccacaacctacttatagttaattagatgtacctatgatacccaaacgtgtgcatggacgtacatgcaattataatcttatctatgcataattatttttatgatacttaagtatatgataattatttgaaagtacaaataaataaattaactagtgtatcatccagctataaatagtgggcacgggtgattaatactgccatgagctatacataaccaaatactatcaggatcattgtttttctacatgagatagacccacacgatccatacataacccacttatatgtatatctaccctatgatatataaacgtacactactggaggatgcatctatagttctggtttgcaacaccctttagtcccgggttataaaccgggacgttcaatctggaagtgatatccatattcttgaagctagcttaggtagagatagaaagggtaggtgtgtgttttacacgaaattctaatctattcataggccctctttgtttaggcttataagccaacttataagtcgaaaagtctaagccaaaacaaacaagcagctttttcatttggcttttttgaagccataagccactctaacactattaagtcaaaagctaggttggagaaggtttttttggcttatatgagatagatgtatgactccaccactaaacttaggacattaaatccactggcttataaatcatataagccaataagctgacttaaaagtctaggccaataagcctaagcctaaataaagagggccataatcatgatgctttttttccagatgctttagtatgtttactttttaaaagttaattgctttccttatttgtaatttttcccaaatcctacatgttggatcgatggtcccaatggaaacggtatacgtacacgtcgtccatggcaacaacaacgtgttctaaggcttgcgtatacgtacgtgagatcactcccagctacaaaagttattgtttttttgtgaaaacatttcaaaaacgcaagtgcatatatatatgcacagctttttgtcacaaaccaagccaaaaaaagtccaacgtgcagtcacctgcaaatgctatagctagacggccctgccacgtgtatggcaagctgaccaagttggtgacgtggcagcactagctaggatacaaatcatgcatacgtgccagaagatgtcgccagccaagcacgtacactgcgtgtgtaaaacgtaaagagattttgtattttttcacttcaaagtttctctctttaaagaaaatgcatttcaaagttcaaaccatgttgttctcactttgccacaaactttatagccagaagatagatgtgtatatcttttttttgtcactagtgaaatgaatttaaatcagtgagctgtgcatatattggatggttgtgagagctatcgcacgaaccagctatcaaccaggcgttacacgtactaatacagctttgcttgtagccgatgcgttctatcatcttttgcaatgcgtgtgtcacgatattatcatttttttttatttaacttgtttacgtgcatttctgtttggggaaaaagatttttgaaaagatgctttttttttgtcaataaattcgaggccaaatgctctctcatctcttcacaaaaacatttgatatctttgctcttgctcttgcagcctctctcttgctcgctcttgcgttgcacgtttgcttgctttgccaccatgtctcaggaggagcagcgccatggccgccagctgccgctagctacgagtggcgtcatcaccttcaacggcgtgccgctctcgccgctgaccgccggcgccgagagcgacggcgacgacgacgacgtcgtcatcgtcgacgcgtgtaataacgggaagaggaaggtcggtgatggggaagaagaagggcgcggatcccagggcggcgacgacgacgacgacgtcgtagctgtccacggcggcggcggcggcggcggcaaccgggcgtgcatgttcgcggtgcgggagcgggagaggcggaggcggatgaacgacatgttcgccggcatccgccgcctcgtccccaacctcccggagaaggtatgatcgatttcacgagacgttgagatcgagagcgctttgcacggacagatcggtcggtgctgtgcttgagctctcggatcggctaagctagctagattagcggccatgtgcccatgtgttcgatgatatctctgttcgtctacatgttcagagcagcagggtggaaatcattgatggcgcgatcgcttacatcaagatgctgcagggggaggaggtcaggatggaggcgcaaaagcaggagctccagcgcgagcgagaccgcctggcaatggaggtggcggcggccgccgggggcgcgggggcctcctcctcctcctcgtccgccgcggcggcggcggtgacggtggcggcgtacggccccgccggcgcggtgggctcctcctcctcctcggccgccgcggcggcgcgcgccaacaccgtcgtcccagtcccacagagggcggcgcgcggcgccacggcgccgacgccgcgtccggtcgcgccgccgcaggccgggacgtggcctctcccggcgcccgcggcgatgccgccgccgccgccaccacccacgggcgccgcggcggtcgcgccgccgccgtcgctcaagacgtggtcgtggggcgacaacgtcgtggtcagcgtgctcggcaacatcgggaacatgaccgtgcgcgcgccgctgcgccgcaccggcgtgctcgccatggcgtccgccgcgctgaagaggtacaacatcacggcagtgacgtcgctgagcgggaccgacgcttcccggacccagaacatgttcatgttctacactattgtgagtaccatctcttccctttgtttatttagagatagtagtttgcaatgcaagcgactatatatgtatagatccacaagaatgggagcactggatcttggctatggtggtgcatgtgttttataaatagcggatagcgtggacttgccataactagattgttgctcgcgaaacagcttactagaaatggaagtgtcagaatcttggagcctacgtaatgtagattgtcgttatccgtattttaaattatagcgattgccctcgtatcggagctagtcttcttattatctgataacttattgtcattattccgtaacgtatagagtatacttgtcatacttatgctgttgcccgcaaaatggcttactggaaatggttaagagctgaatcttgcagtctacgtaacgtaggttgtcgttatgcatatatttaattatagcgattctctacgtatcagagctagttttctatttattttataacttattatcgttattatgtaacgaatagattggactttccataattaggttgttgctcgaaaaagggttcatttgatatataagaatatgaggatcttggagtttatgtaaactttggtttatcatggtgcatatatttagctatgtgtttatactcaagtcaaaattgttttctaattatataggagcctcccatatgtaggggcgaacctgaaatatgattagatgaaagactcatctccttcctccttcagcaacaccctctccaccccctttttctgttcctcctctccctcttgttctcccttccttctctccttctatcaatagtgatccaatgggataggggtgacttgaatcccctccccctcccccagcacccatgctagatgcgcccctatccatagctatcttttaacgtatagtgcagacttgccgtggttaattaggttgtttgcttacgaaatgactttatcgcaatactatggattgaaatattgagatcatcttgtacccttgattatcgtggtgcatattattacaacattgttttgttgttattgacaaccgtatagtttagacttgttttaataatgattcgtcagctcgcagaccacttgctttaggccttgttcggttacgcttggattcaatctgagtcaggaatgacaagtgtagtaagaaatttatgatatatacaatgagagaccgggatttattctgggccatgaaccaatttacttatgatagggacaataagggaccgggaatcaatccactagtcaagaggtgtgaaactaatcccaatctattattgtttctatcataagtaaattggttccctgcccagaataaatcccggtctctcattgtatctatcatgaatttcttactacacttgtcattcccggcccagattgaatccaagcgtaaccgaacaaggcccgagggaaggattggagtgtatttattccacacctattgtggtgtggaattctaccccctcaatcccctccaatccttttcaatccccttcaaaccgaacaaggccttaagcggaaaactctaagcttcgagttcacaaaatcatgcgctgcgattatgcatattgctaaggacatggacatgccgcatgagtcgatgtataagtatatatggtatctgttaatccactctacttcaactaaattatagattacctcgatgtatatatttagtttgatgaaaattgggttcagtgtttaactgaaacttcatctatgttccattgtacccaactgctgcatatgctgctgacattttgggtgttgaatttccaatgaacgtacagatcgatatgccggacaggcagccccagtttgtgcaccccaaggtgttcgaggccatgtacagagcggcggccgccgagatcgcggcctggatcaactgctactgatcgagaaaagcccaccaccgccggcaagaacgatcccaatagggaagattcagttcggctacctgcctacctccattgcatcgatgatctcaccagtgtggtcgcatgcatctctgcagttaattatcgtttggtttggtttgagcattcggctcctcttcctcatatcagtccagtgtcgcgtcaaaactgaagcagttggattagattttgggttgtttctgaataatgttggcgtgtgtgcagctagcatagcagggatggtgtgtgcaacgtcgtcactgaatatgttgctgcagaacattttagtccatttttaatttggtgtggtttgctttccaataataaattaacattgtgaggtttgctgtcattttgttctctctggtgctactcagtactcccattattaatgtcatagctgtagctgtgagctaggcctcgtttgggccttgggtgaactcactcatgggctgctagctcatggtctgcagtaatccagcccatgggattccagcagttaaccttcaacaggaaagaagaaattcgaaggaaccagtccatttgcacacccagacgaactgcagtgaagaagagggcttatttgggttgatccccaaatcaacattaccaaattcatgctagtacttggtttggcccacattttggtgattctaaaatttggtactctgtctgacattaatctaaagactcttatttcaccaaaattttagtgatgtcaatttttttagaaagtaatgtcaaattttggtacttttttttcacgaacacgcatataacatcctgaaaattcctaacaataaaaatcactaaaattttgaaaattttcaaaacttttatatcatgctggatgttatggttgttcttgcttgccaaactataaattgtcaccatggagaatcaaattaaagaggtacatctacataataaatacaatttacaagaatacattatttattactaaacctataaatatttatgcacaagaaagcaaagccaaataaagcacaagtcaattatttatttctataatatagattacaaattgaatgttaaatactttaaccatgttgacaagtgtcatgacatctaagtaaccatgaaatagtcgccactacaatgactatatatatatatatatatatatatatatatatatatatatatatatatatatatatgagtgttacactagaataattaaattaatatctataactttcattgagtctttcatggaataaaattcactcagataaaataattggtcatgtaaatgaattgagctttatatataaaatgtgtttatgtgagtgtataattaaacatttagatcaatattgtaccaagtctcaatttaattttatggaataacaaattaaacatatccatgtaaaatacattgttatacaagtaaactcgaccaatgtgctattgtattattaaaggtcacattagaatatttaattagtttttaagaaatatcaaagcctagaagttatattggataatttttggataatctaatggaaaacaaattcatttgggaattaatgaataaccaagtaaatattcaaatcaaacatttgaattcgcaaaaccaaaatgaatagattacatttcaattcaaatccaatcccattcacttttgcagtttagcccttcccttttcctctttgtccttttcttccttttcttttcttctccagccggcactattcatcgcgcatgacctgttcgatatgggcccaagccgctccctcacctcacgccgcatccctccgcatccgcgctcgcgcccagacaccgcgcatgcgatcgaccacgccacctccgcatcttgcgtcgcccccgtgcaccgcatcgtgccgcgccctaactccgtgttacgccaagtccgccattctgccgcgaatcccggcatccgtcagcgccgccatctccttcagccgtcgctccaagagatgaggaacgaagccgattggataagcgcgtcgccattgccacgtccgccccattatctagacgccatgacgtcccatcgcccctccatgcacccgctggacaaaacgatgcgcaccctctcaagctagcgctgaggctcacaggctaggagctgtagggtgatgattaagccacagagacttaatggagaagaggatggaaaccttagggcaagttttatagtagaggtgaccaccacatacaatttcatgcatgacatacataattaaattaaaaggtgacatgtataataggttgtttctaccacacaatccccaacatctctaacactctcacatgtttattgaagtttgtgtagaggttgccccttgcatgagaggtgactatttctctctcatctttcttctctcctccacctcactatttagtcctatgtggcatattggagcttgtgcttagatgcccatagtactgcccttagccgcgttaacctccctaacctaggccgtagacagccatcgagtgcgcctgtcatcaacctcatcctccacgctatccaggcttatccccaagccaagcccccataaaaaccccaaccctctctgcctctcccttggatacacatttcgtcgaacacctatcatgcatgccagcatcgtcttctctgctccaccaccaccgccgatcttcgtcgtttccccattcctcggtaagtcctcgctcctctggcctctcctagttccgtagaagctagagccccctctaattttggcggttagcgcccgaagccgtgacggttcggccgccgttccgccaccaacgagctcgccgtggacaagccatcccggagctcctcttagccatatagtgagaaaaacggaacccccgtacgccgtagatgctcatgcccccatcaatctggtcggaaaccttccctaccaccctagccccgagctgcccgagctcgggatcatggcgtttcttggtttgccgccgtccatgcgctgccgtgcgccgtagccgcctgcggggtgttcgccggagctctccgcaccttccccggccgctggcctcgcgccaacccggcctcacccggctgcatcctcccctgctgcttccgctcgggctggactgctggaggttgaagacgactcccttctgagtcgctgacgagctaggcccacctccatcttctcgatagaaaaataatttggaacaaaagaaaatcaagaccttgaccccatttgtcagtccggtagctgtggatgggatttcggattaaaataaatcaattaggaacagtaacttttcgctatttctcggattaattcaaatttgagtctttaaactagcataacttattcattttaactccaatttgagtgaaacttaaacctaaattcataagcttcccaatggtatataactcactatttaataaaatatatttataattattaaataattaatatcaaatgattagataatgattaaactaaaaatgtgctagcaaataaaaattatcattgtacagtgaactaggtagaggaatatttgttgttagcatgttctgtcactatgggagaaccatgtgtagctatatgtattagttcaatttaaagcaaagataggacatattagtatcatttattattccatgattatatatagtcaagttcatgatttagtcattgtctaaatagaggattaacttaatgagtttataactaaaaatctaagtacacacatatcacagtccttagtttgtccatgaggtataataagagagctgggtgtgatggaatcaatcgaatgatagatttaaccagtgcaatatcctatatagtagtatatatataatttggttgacgcctattatttaacagaacaataaataactcatgttcggtaaatgatccaatattaacatattattgaactcgcatgtatagtacatctatttaacacatacacagtaagtcaatcacctacttttgcacctattaaactatgaattgttcgataaacatcaaagttagataaaacactaattataaatcttgacctcgttacaagaccacacagacaaataatctgtacctataacctcacagatctaacatatagagcatggatgattattaacccttttataatttataatgacaagtaaaatatgatcataattaaaataatgccccattggtaaaataataatataaatgattccttgtgattgcttgttgatcctaattaaattaatccatccaacgacagaacctttaatatatgaccattttacttgaatagatgcatgcgtagtcatataaccctcccataaccctatagctagactaaaccacatagtagcactgtatatctcatatattatgctagtagtaccaatagagccatcaggacaatataaaatactaagaaaccttagcccataagctttcttgtctcatcagctgcttgcatgctaagtaatttagagcctaagctacctcaattttccttacctatataaactgtgcagccatagtagagacttcgtagcaccttacaatccattagcaaacacagtaaaatgagcaaccctaggtacgacccaacaattatattttgtttgtgcatattgattgttgcttgaatattggtttctctcgcgtattatagtattggtgtatcgattagtcgtgaagcaacatatgcaagcttccaggaggtgaaggttgatcaagattatatcaagaataggaactatcctgagcagcaagtcatcactaatctttgagcatgttgaacccattgcgaacttattttggatttaaaataaagtttgcatgctatatggatatacgtgaatgtcctactttgttatatgccatgcctttgatattgatgacccatgcaatccttgtaatccataatatcgtgtgtctttactcaatactttataaatgcttagccatgctactttagaatcatgcatattcatatttatcaaaatactttatgcttgggcaactacctttgggaaggtggttgagatgcggcatgtggagacatgagtgccacattgccatgacattggtgacatgatttgtgaaaggaaaaataaaactaaacaactgttttcgactggggcgactggatgacttgggtggagtccggtaaaggctagtgccgtccctggtcaattaaggaccgagccatgaagttaagcatgaaacgacctcagtacaaccgtacttctcgtgtgggtatagacctagcagagtaaatagccgagcggaggcggaacccaagccgtagtggttttcttgttgtgtgtgaggcagggactacggtggggcagccattggtatgaccacgaggggcgggtgcctacagtggtgtcgccatcggtaggactgccatgtgtaaacataaacttaactataacttaactcctctcactgctagaaatcttggacgcctagagtgcatgaggactaaagttgatggagcgggtactgccaaagtgaggttatggaaaggctttgccgtggcaagtctcattcgttgggatgtaggctcatgtgttgggcaagtcgcggagtacgggtaaagtgtacatccactacagtgtgagtaaatcaatctattcgaatagccgtgctcgtggttatcgagcaccgggacgtgtattacacttggctagactctaatttcttaatctgattgggatgggatatgcatgatgattttgtgctgatggatcaacttctcgagaggcgagaaggggtagaccccagaaaaccatgacgaccagtggcgggaagctatccttgggaacacaatggatggtggacagaactgtcgctgtttaatgaaccatggagttaaaacttgattagtttatgctaggtcttaggtttgtgaaatgatatttgaaaactcagctttacgcaaagtaaccatagccactccttgtattatcctgtacattactgcattttgtgtggtggcttgctgagtacttttgtactcattgttgctctatatataccttttagcagagtgttgaagagaagcccttgttagtacgcttgcgtacctagcaagatgatcggagtgcagttccattctaggtctcgttccctagtcgactgcttgtgacatgtcaaccaggcccttgtattattttgtcttccactgttgttctctgatagttgttggcctgcctggccctaatgtaagcatttaactctcttagcctgaattcattcgtgatatgttgtgattcggctatatatgtgtgtaccaactactgatccagggattggtactgataaacacagaagatttccgatttccgaaatcgggggtcaacagcgcaaaaggattgcacgtcaatatattagtagaaaaggaattttgttacacgccgcaaacagccagactggcttatgccaagaaaagggggaaaacataaccaaagaaaagtaagagactactacgacggctaaacgcaactccaatcagctgggaggagggcagagccccgctacactcgcaagaaatccccaaaagaagcaacgccagctaacgaccacagacgaccctccgagaggatggactctagaaccactaagaccgaagagagcgcagagtcgaagaccctagagttatgtttcttccataactgccaagagacaaggaggacttgggagtcgaagtcggcacggagatgcgtaggtaagcaagccctagaagatggccaccagtcctagagccagtttccacggggaggagaaagggcagcccaaccaggaggcgacagcacacagagccagacctgccgagcgaacacgcagtctaggagaatgtgtttcgccgtctcaagctcctgagcacaaaaggggcaagccgagttgctatcgataccacgcttctagaggagatcggctgtccagcagcgctgctaaaatgcaaaccagaggaataacttgcatttagcaggacccttcacgtgccaaagaagatcagcacaggcgaaggagtgttggccatagaagaacgcctggtacgctgaacgcaccgtgcagcactggttactcgtccaacaccaaacaagacgatcttcgacacctggcgagagccgattgtgaagcaccgcatcccaagccagaagaaactgggagatgaccaggacaatgagggcgccaccgatgtcagaaacccaggaattgttcaccaggccagaagcaaccgtgtgcgaacttcggagtcgttggggcacaacgaagagaaggtctggagccaaagaggccaccgatccaacggtcagaccagaagagcatcgactcaccatctcccagcacaaagaaggtggacgcctcaaacatgtcggagacggtccgctcaactggggccttcaggccatcctagtagggatgccctgagcgctgaagccggagccagcaaacacgcagggcaaaccctgccatcctgaggtcaggaattcccagcccaccaaaagctttgggacgacagacgttcgtccaagatacccggcactgccccccatgagctgagtccgtacccgtccacaggaaggctcgacgcttcttgttaatggctttaataacccagacaggaaggccgatcgccatagacacatggaccggaatggaggagaggacagactggaccagcacagagcggccggccagcgtggtgagacgtcccttccagggggaagccgatgggagactttgtcaacaagcggttgtagggccaccttcggcaacttgcgaacagatagcggaatgtcgaggtaggtgcaagcaaaatcagaaatcgtgcaggggaagcaagattaaactagctctaggtcctcggccgagcaacggatcgaagtaatcgagcatttggcaaaattggtgcgcagcccgaaagctgcaccaaagacagaaaggatgcactggatgaacccaagatcctgtcgaaccggggaaaggaagagaactagatcatcagcatagagggaggcgtgaggtcgcaaggcacgatcgttaagctgaaggaacccgcccgagtcggaggccttacagagcatcacattgagcacatccatgactagaatgaagagtataggggatagaggatctccttgccgaagacccattcggtgagggaagcgtggaccaggcaccccattgatcagcactcgggaagaggaggcactgaggatgagggagatccaatcccgccaacgctaactgaacccgagatgagcaagcacctgaagcaagaatggccaactgaccgtgtcaaaggcctttgcgatgtccaccttgagaaggaggcggagagtgcgcctggcatggagggcccttgccgcgagttggtcatagcgaaagttgtcgtggagggatcgacctttgacgaaggcactttgattggccgccataagcccgtcaaggtggagagagagacgggaagccaggatcttggagaacaacttcccaaagctgtggatgaggctaatcggtcaaaaatccttgacgtcaacgaccacatccttctttggcagaagggagatgagggcatcattaagggaggcaaatccccggcctttagtcaaaaagagggagttgagagctgccaagaactccgacttaatcaccgaccagcaagtcttgtataaccgacccgtgaacccatcaagaccaggcgccttgtcagaaggcaaagacttaatcaccgcccacacctcctcctccgagaacgggtcatctagccccccaagctgcatagggctgaggccaagggagtgaaggtcaagagcgagatcaagctcaacgcacgtccccaagatagatccaaagtgagtggagacgagctcttaaagctctcatcatgtgaaacgatgagctggtctccatctcaaaggtgagtgatgaagttctttcgccttcaggccctagcgtgatagtggaaaaacttggtgttagcgtcaccctccttgagccagatcaagaacgaacgctggcaagctatggtgcgctcaagagaggcaagcccgaggcgtttcagcttcaagtcccgccacaactaggtcgccaagggagaaagagaccggttctcttgcgtgacatcaagtcggaagacaagctccttcgccatttgaaggtggagacggacgctaccaatgtgacggtcgccccagctctgcaagcgcttagctgtgttggtgaaacaccaggcaagcgcggcgagagggggaaggttggacggaggttgccaggcgtcctgcacaacttgaaggaagccgtcgaacttgcgccaaatggcttcaaaccgaaagctctcggcaaatcgacgcaggaatgaagcaggagagcacagtgatcaaaggcaacagaggaggcttcttgaagaagacatgggggaaagagctcctcccaatccgtagagaagaaaacacgatctagcttgacgagcgtaggagagtcatgctcgttgctccatgtgaaacgacggccgtgaagcggcaactcccggaggtccaactcatcgatcaatcgacgaaagtggcccatcattcggcgattgagattcaagttgttctcgtcctgggagtcgaggataaggttgaaaccgcctgcaacagcccacagacctgagcaagaggatcgtagcatccgaagctcatccaggaaccaaagtttctttggttcttcctatggcccatagacgatggagagccaccagggggcatcatcggagtggtgccgaaccaacgcggtaagagataattccgcaaggtgaacatccgagaccgactagacggccgtccaccaggcaagcaacacacccccaaaccgaccaacagcaggcaagaaagaataatcaaactcaaggcctaacatttccagaataatacgagacgggatgacatccatttttgttttctcaagacagagaagagagacccgctcgtcacgaaccacatcacaaaccgcatcccggcgggcgcgagagttcagaccccgcacgttccacaccaaaatgttctcattacatgatcccatagaaaagagaccacgcagagaaggggaagacaagggaaagggtcaaccgcaggcagacaacatctcaatcgcctgcgcaggaggcagcgagctagagaggagtgcagagagggcgatgatgtggtcctgcgagaggggctcagtgaagagagcgtcgaagtctgccaaggcctgtgccaggaccggaccctcgttgggcaccatctcgagcttgcgcatcaggttgcactatgcgcgagtaatcatgtgacacgggccagcaagcgcgatgtgggcagcaatccacttgctgcgcttcggcaccactcccacggccgcgacggtaggtgccataggcgcggggggagtatgcggcgcaggacagagaggcttgcagcagctggcgaggatggcgcgaagagcggcgttctgcacgaccgagggaggcagtgagcacgccatcggctggccgtcgagatcaagagcgagaatcggcatgtcgaacaagatctcctcgccaccaaccggcatgtcgaacaagatctccgcgccatcagccacaggggaaggagggactgccacggccgctagccacgcagccccctctcccacagtcggtccagactcgtgcccaatagcggcagccatggccggggcctcatccccagcagcagatgcagacacggacgtcggcgaaggagacgtcggagccccctctcccatcaccggcccatccaccatggaggggcgctgagctgcggaggaagaacgctcggtgttggcggtagggatggaggccagcgaaggtagttttggcggggaccgcggcggccagaagacagccggaacctcctccccggcagccaaagcatctagctcgtcgaagaaagccacagcagccacggcctccgggagtgacggcgatgaaggcggcgacgcggtgaccacctccacggccaccaccgcctccgtcggcagccgagggcaagctagcctcccccactgccggcagggcagcgaacctagaggccggcacagtcggcgaaggggtcggcgactgcggcaggggcacgtctggtggcgttggcggcacgtccggcggcgtcggcgacgggagcgaggtcggcagcgcgggaagcgacgacggcgggccggcggagcgcggcgacgcacgagacgacgacggctgcccggcggaacgcggcgacgcacgagacgacgacggcggtatgggggagcacgaagaccctggcgccgagcaagatgaagacggcggaagcagcgccggcaacagcggccgcggaggagagccggcgacagcggccgtggcggcgagctgaccagcgacaacggacccggaggagagcccaccagcaacatcggcgggccggccggcgacggctgcctcgacgaagaacccaccagcgacagcggttgaagcggccgcggcagagaaccctccggcgactccgacgacaacggccgcgcgctgcggtcgcaacgtgacggcatcccgaggaggcgagcagcaggcgaaggacggctgcaagggcgtcggtggagaccgtcgaggaggcggcgagtcgtcaagccccgcagcggctggcgagaccgacgatcgagaaggtcagcggagcgtcagcagctgggccgactgggggcaccggcgacaaggaaacctcgccctcctcacccagcggccacaccgcgactaccgaggaggcgatcccttccggcgacatccatggagagaggcggctgggctgacacggaaatccctcgccggtggcgacgcggcgccggcgaccactggcggcccagcggtcagaggcaaagcgagaacgagcctagcggcatcccgacgtcggcaagcggagcagcctcacaacccccgcccaaaggccatgacggcccaagcccaccagggagagaagggagaaggcccgcctcaagatgcatggggtcgaaacgagtgggcccatccaaggcggcccaatgggggagtggtccatcatggggcacagggaccatgtgggatggcccgaaagggccactcaacggcgccggtccaggcggcagctcgcctgtcttggcgccgcctcactttatttggcattcaactgttacactatgaaacaaaacagaaaaccagtgagcccagtccattttactcttcgggactaggctatacttgaatttgtatgggattgtctgggttgatatccaaaataactgcaccgaaattgtggtagcaacagcaaatttttgtcaacacttgaatttgctaacatttttttacgtaatgcaaaattttggttctctacatagcatgaaaccagtcacactgcaaaataaagtttgtaatgttatgtgctatttggttccgaaccaaacatccacaccccactataattttggcgttgaaacaaaattttcaagttcttttcaggtttcgaaaggtgttgggaagtttagtgttaatcattttagagataacctattctataccatcgagtttgttcaagttcaacgatttgccatcgacattgtctctttctataatataccgatgactttagcaattgttctatgatataccattgggctggaccttcttttcaaaaatacccaaaatatcctcagagacatacaaaataaacaattgatttctctcattagaagtttcaaaaaaatatgaaattttttatgtgacctccttacacaacatggaagtttgtatacaagttttaaattttttctggtatttttattttttaaaaaaatatttttacgtggtatatgagagaaattgcttataaaggagatgatagcataaaatatcttatgtagtgtgtgaaagatgatttatattaaaaacaaaaataataaaatatttttatatacaatataacatataagttataattttaaaaaaagaaatgtaaaaaacttgaaactcctataaaaatttctatgatgtgtaaggaggccacataaaaattttcatatttttttgaaatttctagtgagataaatcaaatgttaaccttgtatgttcataagggtattttgggtatttttgaaaagaatgtccaacccagtgacgtattgtagaacaattgataaagtggcaggtatattgtagaaagatccaatgtcgatggtaaatcgttgaactcacacaaactcaatggtatagaatagattatctcataattttatggtgaatagtgaagaccattggtggtggtggtagagttatgggtacattactctatttaacatgttttgcatcctagtattcacaaatatttaactctatttaatatggataactcccggcctctataaaggattttgaatggatggaacacatccagaaagcctgtccaaatttatagtattaagatatatcccatccacccaaaaatactctatattttaggatgggcggagtatttcctacttaaccttaaaaatgcctatgcgaagctcggatatggttcaggtgtagttactagtgtgactgcaacttaagcagtcacactaagaccatccaagttatatccaatggctgagattcctaggagcactgttcacatagaaaaaatattgtacatatactgtagcaatggtactgtagcactttaatctgtacccttgatctggaaaaatggatggataagataccatgcagtcactaacttgcagtcctagcagtgactgcatgtgatctcaatctgcgaagctcatagtgagaatgcactcatcaaaccccaaatgcccttttaccagatttttctgtgatgctacattttggttatgatttgcttgggaacatacaaacataccaagattattatcaattaacaacagaagggatcagagagaaagtaaaagaaacgaaaagaaaaacggcatatgctccccttcatcttgcacgcatgcatgtgcatgccagcctcgcaggctcgcaatatcgatcgatctcgcccctgtgtcgcctcatgtggcggcacgcacggcccgcgcgctccccatcgatccatccatcctcgcatgcatatatcgatcgatcagttctagaactgcaagcacgcgaccacatggtctccctccatggatcaaacacttgttatatggtaatcgagccaattcttaatttgttatttttggggttaagtgtagctggccaatcaccatcaagcttagcacatgattggcaaaagggatgagataattaaaaaggaaaggggaaaaggaagaggggagatcacgtgggtttatccatgaaaaacaacggtttaaattgtggaccgtacaaagacacaaccggccggccagagctttgagatcgagctcaaggtacaataatgtcatttgtactttggtcaatccacagcagtgttttgttgtggtaacaggagtgcgacaataaatggagctgagaggacgacaatattgatcatttgttcggagagcttctctcatattaccgagtaattttaccatccaacatttagtatctcgagatattatattttttttatctcgaggtacggtagtagtataaatttagtacctctagtgtaaaatttgatacctcaaggtacttgctacttagtatctcgaggtactaaaattttgtatgcaaaatgtggtacctcgagatattaaatgttggatgataaaattgctcaacagtatcagtagtaatagaatctacaaatgaacactaattctcagtatgttcctatttatttggcaatatcgatcgaccactgtaaatttaaatttatctttgaccagtaaaaagttctaaattgtgatgttttaataaacgtaagtagtatagatatatttagcatgcaaaaataatttgataatacagcatattattaatatttattttttcgcaaaagaaagaacggtcaacgtttatagatgaatagtgtctggtgacaaggaaagaaagaatggacgccactttacagttctttggagtgacatttttcgatttgcaaaccctcaagttgcacacaaatgttttctcatcttttttcccagagatctcaaacgagtatcgatcttctgttcttagtggcagagcactcagtcagcatcaccccccacacccatgagacatgaatgacccacaagcaatagagccgaaagcaacgggatcgagaagagccctgcaggcaacaacaacgcaattaatgtaaaatgaacagaagcatcaatgaatgcgagaggaagaaaacaacgcaaacgcatcgattcatctacagattacctatacagccaactagccccacggagccattgtttcgcttattcacggaataagcgaaatgccatatttacaaacgaaaaataatttatgaataaaacttttatatatgtatttttagcgatctaaaaatgaaagctaaaaaataaacttcaatgaaaaaaacttaaaatcaactccaaatttaaggttgaaaatttaaaatttggatgataagcataagtatgagcgaaaagaggaggcccctttatacagtgagaaattaagcctgacctttgtttcaacagaagccacaccactaccacggccacctagagtttagctcaagttcacctgctgttcaggaacagtagagagctaaaacagcaaagcaagtgcatatgcatgctacaattgcagccactataccacaactccacaaacacatctatatatatctattgtgctcctggtctctagctcactcttcttgcttcagcataatctgtagatagggaactagcgctagctagtggcacttgtacatgcactactgcccttttctcctctcttctagctgttgtgctccatgagtaagccaaagattattatgagtgctatttgaaacactttggaacattactttttttaaatgttttcctttttattttgcgagatgtcaattgaggtctgtgcggacttgtgtggtatatagtagttatgcctaactttctttttccgttctttctgcacagattctaacgtggattcccatcagccttacacatgatgatcctatgaattcattaactagctgagcaagagagggagaggagagaaaaaagaaaaaaagcaccgaaaagttgcaaatgatgctaggcagagtggcgaacagacgacggaggtatcactgtaccggcactctattagatcatggaaaaagcacactcatacactaggtcttctttacaaagcctaagcagcaagcatatatagtgtgtagcttaagaattagtcgtagtgttgttgtttatggaaaagtctaattaacacctaaagtactcaagtactgtatcggtaaagtattaataagcttaaggtcggtctacttggccggccccgccctaatggtatccggaagtacaaacaaatattcagaacaacccttttaaatggcttttgtaagttattttcctgtgtaaaatacatcaaaggtggcatggtattgtttatatattagcccattctattttacgagaaaattccctatgtacctatgagtttccgttgaatctcttctatctctaaattttgcctcatcctctaaatgcccttaggctcttgagttttttttatcccctctatatccacgaagttagttcaatgtgagttgaccgttagatttttttttctaaaaatgactatattgtcatttgtactttatactagctacattaaaaaaatataaatctcattatgaaaaaaccttgctctataataaaataaaaaagggatataattattcgacaatggattttaaaaccaaaattagattttcaaactttctaaaaagttgatgaaatacatataaaggtttcattgggaaatttaaaaaatcataactattttatagggttttaaatttcagcaaaaaaattgaaaaaaaatccattggatttggtttgaaacttaattaaacattaaaaactttagttttcaaatttatgataaattaattgtgtcccgtttgtatttttacaaatgaatcaacttttaaattgagggccatgttttttaaaagaaaaatcaactacgacttaagtaagagaccaggataatttagactttttaaaaatctaatggtcaactaacaattaaattgatggaatgggcatagacaagatcaaaataaaaaaactcaagaatatataatggatgaggttaaattcagagatatacgaaggattagagaaaaatttgtgggcacgtaaggaattttctattttatataaccaacaacgatcttatgcatcttaaaaaccagttaaaaacctctgaaatggttttgtgaatggtttatttgcaatgtgtaccatgacaggtgatatggcatagcatgcgatagacatatatattagcccatatcacataagcatgtctaaatattctctctctctctctctatgatcggtgagccaatgaaccacttgcaagatccaaatcatcccctaagctggaaattatttaaccgaatccaaacgtcaagccattgcggacgcacaataccgctgaagggcttacacaatacgaagatgggtacttcctccgttctaaaataagttaaactagtatcatatatttagattcgttatattagaatgtgtcacatctaatactaaattaacttattatgagatggagggattacctgaatccatgctttgagagtgaaataaacccccacagaacatcaatggattaaaatacaatttttcccatactattagtatacgtagtacataataaaactcttccatcatctatcatcatctatcagtcattgcgttgtgtgtcatcttatcctctccaccagtccagccggccttttgtccatagagagtatgaataaccaaagtactaatatatttgtcagcatgcagcagcagataccggcaaaagtgcctgtccctgcgaccactgactaccactccccgtttgaactcgagttcgtggtagtagtgtgtactccagcaagcagtaagcttgtcctggcatcgcctggtggggctcgagacacgcacacacacattagtttagttgctgagcccccctctcctgcttgttctctgcatttggcactgggagcgcagcatccgcttaactttgggagttggcatcgctagctttgaccatgaccggctacttggctaccagtggagagtgatgactgatgtgcacgatgagtgtgatgagaggctaagctcgtcacaccaattattgctgaattttctccaatctctctgctcccctgacgaagcagctgcccctgaaatggacaataaaagatgttgctaactggcggccagctgcccccccccccccccccgacccacggccttttttttctctcttttatcgcgatttttttttcggttttttttttgcgatttttttttgtttttttctgattacttttttaatctttagcacacttatttttaaaaaaatattttgagttgaaagtttttaaatcttaacttaaaaatttttaaatctgatttgaaagtattcaaatctcgagttgaaagttttcaaatctcgagttgaaagattttaaatctgagtcaaaagttttcatatttcaaatcttaactataaatttttcaaatctatacttgaaagttttcaaatctcgagttaaaagttttttaatccgatttgaaagttttcaaatctcgagttgaaagttttcgaatttgagttgaaagattttgcatctcgagttgaaaatttttaaatctgagttgaaagttttcaaatatgagttgaaagttttcaagtcgaagttgaaagtttttttcaaatcggagttgaaagttttcaagtcggagttgaaagtattcaaatctgagttgaaagtttacacatatatggaaaaaccacctattgggccgtgtgggctggcacgtgcgcgccgctggcgcgtacgcgctaattaggatttctgataaaagccatcatatggtgctaaagtaagctctaggaggtcttataacccatcgtttcgtttatacttatgcttttaaactaaaatttaaattttgaaacctaatttgaaaagttgattttgcgttttttttcatcgtactttattttgtaacatttgcttttaaattagtttaaggtagacggatacatataagcattagcaaaacgacgacgagggtattgatccggtggggtttagacgtgctaattaaattaaattatgggtgtaaagtggattccggtggccggaccattatatcacgaatcttgaggcacattggacggtggcgaggagtgatggtcatcacccctatgtaagtaatttaggcccatgcatgcatcaacaacgatcgtgcacaccacaaaaggcgccatgatcaagcaaaccaaggcatcttctctctctctctctctctctctcttcgttatccctcgagcagctaacttgagcacgatcgagaggccaagctaagcaaattttgcattactacactccacaagttgtatatcaaacatacttaaatagaatcatattttcatttggttaaacttacttgttagtactagtggtcctcacaagtaattttgatacttactttgagaaaaaagattagaatgtataattaatgagggtagcaatgtaatttacctcacttcctaatttagtgtgagatctactaaaaacgacacaagtaaattgaaacttagttgacctgtttgggaaattcaactagttctcttcaagacatggctagcacagatttaacaacgggaccgtgattcgataaaatgccaacctcaaactcatgctactcgtcgtgttgccattttctcatttttgctaattctcaaaatctttttgcctcttctttgtggtgatcagacgaaaactccctttgactgatgaaggtgagaccggtgtgtgtgggctcgggcggcgccaaaacctcccacaacgccgccgcctcctcctgccccttcaccagtgctagcaacactgcccccttctcttccttgtcggcgacggtggtggttcttgctggggagatggtgaaggagctatttgtgcgtgtattttgtaggtcgacggtggagcgattgcggcagaacgtggagctgttgttgccgctggtgctgctgcaaggaggaggaggaggaggtggggtggtgcccagctaagggaggcgttggatccacacgcccgcccatgtgttcgatgtcgactccgcatcgaactgacgctcgcatcggctgcctcgaacactgtgttaggatgtcgtcgtgacgacagccttaatttgtggctataacacagacctccctacccccgtccaccatgtccctccccttcgtactcccaccgtgccgccgtcgaagaccatgggaatggggattgaaccgtcaccatccaagggcatggcgttggggatggaggtggagtttgtggaggaagaggaggacggcgtggtgggtggcggcgtcagggtggggaaagataaggtgaaggagatggtaatgagcggcagcagcgacgggtgggaggccgtcggatctacagcatgggcggcagcggtgagaccgattgtaggggtattttcgtttgatcatctcgcggctgagcgaaaaaacatttagaaaatcactaaaaccataaaaatgacaatccggcgagtagcacatgctcaagattggcacaatcacgttttgaggatgacataatagcgaaactcagttttgaagatggctaaatgtccttttttttttcctccgtgttgttgggtttattagcaatcgtgcaatggaatttaaatgttatgtttgggagcggaaatcattttttaatacctaaacacccaatattaattagatttgcatgccatgctaaaaaaaatattctagattcgtcactgagacacaatatttataatataaacatttgtacagtgttgctagagaaatagagacatgtatcgtgaaaaagagacaggagatgcaagacaatattgttcttgttaaagaaaataacatggtgaagcagaggaagtactatcagactactaccagtagctatcttggttaattatccattttatagccggaatcgcaagcccatggcacgcatatatcctggacatcgtggcgtttgccagcgaatggcgtggacagtagtagcagcagctagcggcgtcggatggtgcgatgccgatgcggccgaggaggaggaaggcgcaaatccacgacgaccaccgctttttcctccctcagtgcgcgagatgcggatactccacccccccccccccccccccaatccttttgactaatcctcccgtgcaacgcgcacacacgcatcacatcaccaagtatactccaataattatcataatcggatggattatgagtaatactccctccgtttcaaaatatttgacaccgttaactttttagcacatatttgaccgttcgtcttattaaaaaaattttgaaatatgtaaaactatatgtgtacatgaaagtatatttaacaatgaatcaaatgatatgaaaagaataaataattacttaaattttttgaataagacgaatgatcaaacacgtacttaaaaagtcaacggtgtcaaacatttcaaaacgtgggaagtataaatatataaatcgatcggtctaactcgaaagaaaaagctctcgcaatcacacgttaagcttttcttttcctgtttcctgcaaatgatgggccaatcctaaaacgccacggccctcacagctgctgccgcagctgttactagtactgatgatgctgctgccaatccctacagtttttgactcgtgtatctctcacacccacaagactgcagtgcagcgcctctgcctctgataacttcatcacagccagaggagaaaacgagcagagagagagccccggtccaacttactagtccaaccgcactactagtaatgatctgaaagttctgaactttactccagtagagcgctgtgcgactgtactgtgtacgtactcttgcagcacgtaccggtggtggtcgtcctcgccaatccggtcaaaagatggggtcgcacgcatcgcatcgcatgcaacctgcagcggcagaagcgcagcatctgcgtgcgtgcgtgcgtgtgatccggacgacgagagatgcaaatgcaacaacaacaataattccaccaccaccgcaaccacaacaccaacaacattccatcctgcagaagccgtcgcgcaacccacccccctccctccctccaccggccattgtttgcctcgtacgcatggttcaccaactggaaaagaaaaaagaaaaaaagagagagagttctgcacacgagatgagaggaatgagagaatgcaatggaggagaggacgagaattggtgcctgttttttttcttggttgatttgaatggagatgagtcccactagtgccaactgatacatacatatacaaaattggaaatttgattggagaagaggaggagaagaatcgaatctcttttttttttttagcttttcttttttttttctccgtcgtcgatgcttggttgctactaccgccgccgctgccgccggccgcaatggcggttgttagtatggttggaggaagtcgtcggagttggcgatggagtcggcggcgggccacgccgaccggagcagcttgagcaggtgctgcgccttccgcttcgcccgctccgagcacccgccctgcaccatgaggaggagctggctcatggcgcccgcgcggaccgcctccacctggagcggctccgatccgcccaccaccgccaccagcgcccccgccgcgtgctccgctgaccgcccggacatggcgcgcaccagcgcgcacaccgccgccgcgcctcccccggcgcccgcgaccaccgcgtcgcgcccgccctccgtccggcacagccgctccaccgcggccagcgcgcgctccggctcccccgcgccaccgcctccctccgcgacgcgacgcgcgagcgccgccgcggcaccggcggcgacggcgcgggggcggttctccttggcgaggcagagcgcgaacagtccacggatcccgacgcggacggcgcgcgcgtgggccttctcctcgaccagcgcgacgagcccctccatgaccccctccgccgcgcccagcaccgccctggcgtccgcgccggacaccgccgcaaccgcctccaccacagccccagcattaaccctgcactccagcgtcgccgtcgtcgtcgccgccccttccccactcaccagcagctccccgagcctcgccaccctctccctcctccccaccacctccacagcctcagcctcacccaacccaaccatagcaagaaccgccatcgcctcggcctcgacctcctccccaccagcgttcgtcccaaacgccatgtcaacgagcgccgcccgtgtctcgtgggtggccatgacgaggcggttcttgtcggagtcccgggcgagcgccctgagcttgcggagcggcgggagcgcggggcactgggcgaggagggagcggatgaggtcggggtcggctggctgcttcggggtggggatgcgctcgacgccgagggagcggtgggcgacgcaccagtcctggatgaggcggcggagggtgtggttggggatgagggtgaaggcgcggtcgagcggggagcgggtgacggggcaggtggtgttgccggtggccacccacgactcgatgctggcgcggtcgtaggtctggccggtggacaccgtcaccgggtcgcgcatcagctccagggagatggggcaccggaagtaccagggcacctgcacccccgccgtgtccaggcccagcgccagcggcacgctccccggcatccgattctcagctcagcttcgcggaatcgcggcgtggggtgggttggtgggtgggtggagaggaggaggaggtgaggagtgggaaggtggaaggcgatggagacgaagggtataagtaggcgggggagcacgtgcgggcagtgagtgagcctcccttccttcccgtcgctgcctacgtgggtcagggggggttcgcctttgcgacgacttggtgtcggaagaaggtactggctgatggtgggccgggcgggcttcatccggcccgcgcgccctggggctacggatgcggacgtaactgcccatttgggggtgagaatgccacgcgagccggtctttgcggggctcttcattgtaaccaaaataaattttattaaattttgttaacgcttaaagtttggtaagttggtaatattgtcaatttttgacaggatttcttatatatttgctaaagtttgtaaaaagctaaatatatacacatatttgataactttaccaaaaagatatgctttgaaatgacattaatttaaacagcccctgcgtttggaaaaggtaaagacctgcacatatatagcaaggaaataagagcatcttcaaaaatgagaactagtttaaaatagtatattattaaccgaattattgtgatggataaaacaatgcatatataagcaggaaataagtgcctctccaaaaataagacctagtttaaaatagtacatttttaaccaaattattgtagtagataaagtccttcttatataagagggaaataagtgcatctccaaaaaataaggccctgtatatatagaagggaatatgagcatctcaaaaaaaagtaaggcttagtttaaaatagtatattattaaccaatttattgttgtggatacacaactataaataaaaattaaatatttagataaatatagttaacaagtagcttataataggtgatctaactaatagagtagaagaaagagagttgcacaaccattactaagtttagctaaatgtttaatgatgacagagggcattaaggacatttatctcttttcaaatagaaggactagtttggtctaaagccaattttcgccatactataatagtggtagcactaaaatcttgacaagttttgatattaccaaatatgctatagtagaacttgtactagtgttagcaaaaattgatatcaaaccaaacaatcatactacactattgaagttgctaaaaaattggtagagtgaaaattggactcaatccaaacaaacccgtaaaacccaaaggtctcatttgcatgcaggtccagctgaccagctctaattaatgggttgccttcacaaatttacaggctaaactctctttcaaaccatctctccctcttgcactgacctcctgttgtctccaaggaatagagtaaccctctagctagctgtatgcgggcaaatcattttttatgttcttcttctcttcatccttttgatctttgtgctccttcgatgagcgagacaactagcaattcagtgttgattcacctctatcccctcttctagttgatctattttgtgttgattcacctctatcctctcttctagttgatctattcagtgatgaagaccacgatggagcctaaatctaacaaatagagtggaggaagaagtttgatctcgactagtaggcttcttttgtattttttttgacgatttgttccaatatatttttaagactttgtatgacttgttgaattcatttttttcataatttgtatgacttgttgatttgttttgacgttgcactaactatttataagaatgttgaagtggttgattttcaggtgtgcgagattattttttccaatattattggaatcattgtttcaacatatgtttgagatagtagatgcaaatgttgcattagatattgaatgatacatgttgagattctactgtatattttttttgaaacgtaagccagcttttgctggttttataattagagagagaaactgtacaaagaagagaaatgacccattttatatggaaaaccaggcccgaaaaccatacagctgcacgattaattacggggaatgaaacccactaggcagaagaaagcatgggacctaactataacaacaacggcggagcccaaatgcaggacattgttgccaagctaaacataaaagtgacacaaacaactccgacatcacagaagaggtgttatcgttgccgagctagccgcccaagcaacccagcaacgctgactttaccaccgcagcgacattgaagccacgaaagtcgccaaagcgaaagcagctccgacatccacaatggacatcagccaagccaccaaagagccacttccttcacatggccagcaccaacttgttggaagagactacaacatgctatcgttgccaagcgtcgccgcaccccaacagcaagcaactccgacttcatccgcagaaacaactgaagagtgtgtcgcccatcacaagaacgaagcggacccaaaaagcttaggccttgccaaacaccaaggaaagaaagcttttaaaccgaagagactatcataggaacttttccgaagcgacgccaccaaggatatgttatatgatttgtctgtatgttacacatgttggatcaaatatttaatgaaacatttgaccgtccaataatacgattcggatcagatgtctaagccgcacagttacctccgctccaaagcaaagacaccaattatcaatttctcatcattaatttatctatcgacctaatcacacatgcttacagagtcacagtcacacatatgtttcagtcggttttgccacgtcttctgcaccgaaagtgttcgatcccctcccctgatgtagcacgatcagagcccaggagcttcattcattcagctaatagctaaattactagtaatcctgaattcctgcgcgcttgctggccctactacagatcctccacagtccactccactgtcagcgtgggacccactccactgtcgcacacacatctgaacgtagattgctcaaacaattgtgactacgcacccctatcgttgttcagataaaactcgaaaaattgttgccatcccctgcaggtttctcttgtgtctgacaagctagctagtaggctagggtccagctagagtacggagtataaggtttgttatataatactctattcctctaaaaatatactccctctgtcccaaaaatttaaatatttttagcacagtgtcaagtcaaacatttttaactttgactattaatagcagaaaaataaaaagaatcaatcatgtaaaattgacgttactagatttatcattaaacaaactatcacaatatgcaactctttttatttaaaacatcttatttttttagatattgttggttaaagtttcatctcgaagactgtgtcaaagtaaaaaaaaatacttatattttggaacggatgaagtaattatttttaacagattaatagtaaaaaattacttaatttgagaaggaggtaccataatattaaggttgagaagaaaagactataaatgagggggttgttgagagtacgataaaaaaatgaacaagaaaaggttgatagaggaaggagtaataaggaatgcttatattcgtgtacatattttaaattttagaaatactactgatattttgaaacggagagtagaggagtagtttttctttcctttttaactagggagaggagtagctgccaacgtacatagtctaaagttttttccagctagcttgctgcacatatatactagtgccgctagtggtgcacacatgtgcgtggtcacatgcgcgcgggctgttcagctagctagctagctagcaccttcgatcaatcgatctggacaatatactcagtccagtggtcgttgttgcatgctttgctttggatcggaggcttggccatagcgatggggaacatgcaggcagatcaagagaagctagggggagtagctacagcccctacgtgagcctaccggcttggctactagcggtggaggcgtgtggtgtggagggcgctggcagctgtgtgggatgccttcattaatttgatactcctagtttgcactccgaggcctttcacggtgcaaagatactgctatgggtatttacagtacggtgatttgtcgctcttgggcccaccaaattgaagaccgtgtgatcaaagttgggtagccattctttggctcgatcgaggcttggtgtcgtggggagagaagtccgcgacgcgttgtggagggcgttgcttcgctgtctagttcctcctggcacgattttgttgccaatcctaaaatcgccctcgccgcctcgtgcgcgattcttccccttcgccagccctcgcactaccgtgtatatgccggctattttcccacctcgcgcgctcgctctcatgccctcttgtgattcctccccctttccttgtcggttgtctcctcatcgtcagtaccatcagcgtcggaattgtcaccgagttgagtagtatgcacagccgcgcccctcaccattgttgtggaccgtggtacgatgggtgtgaaaccctaacccaaaaatcattagcccttgatgttccaagttctgtttttttccccactctcatcatcttggttcaaaacctagattcgaacctggcaatgtagcatcttcgttcattttttacaagattcgaacctggcggctagtttatctcaatcttccagccaaccatctccattccctgcacatctggtgttccccataccatctacagcgttcccccctgcacgtagccgccgacacctccaactccacctccgatggccccaagcacagctggtgtggcggcaccgttgagctccagatctgcatgttggcatcgtgtcacggcctccccaactgtcgctgctgatcctaatcttgtaaaatttcagtggcagtggcatggtcctaatcttgtaaaattccagtggcacggctacgaatagacgaattgtaatgacatttttctgaataggtaaatttttaatggcatgaatccaattaacccttgattttatatattggaccgaacaaactgaatgatatacagtcgccggtggttacatagatagtacaaactggttgtacaaatttaatagtttgtcttgtttatatcttaatgtgtttgtcaattttgaacctaatattgtgtgaagtggtatatatacattggatgaatgttgtcattttttttaaaaaaaaatatagctatttggatggtttaattatagataaaagagggtacatctcatcgtggaaccaagactgtttttcatattattgcctcttttttgaaatgtttgatgttggttagtttatttttgagctaaccaatataaaaaaaatggagggatcactatggcttgttcacttctttagaaaaaatcttatcaatttttagtaatgctaaatattggtattactaatttttttttatggtaaggtaagatctgatagtgtttggcttgaagcattttcagctttttgatagaaaatttgtgagtagaatgtttcagaattaccaaaatgtgattagttgtgttggtaatgttaatgttctgattgttacattactaaattttagcattatcagaatttaaaaggttcaaaatgtctacaaattgaataaaccatatctgacctactgtatatgtaaccaatatggtaacagtttggtaagtggtaaccatctgtgttgcccgggcaggagagctagcgaagatagcgtgcttttctctttgagttgacgcaggtgtcggcagctagctagatagcgtctcgcgcatcgtccaaagtcgtcatcggcgtgcagccaaacatatgtcgatttcacattagtgattagtgtggtagtagtactcactctggcgaatggttgttggatcagagcagaggaaaatggtaaataaagctagctctaatttcatatatatacccttcaatggtaatttgatatagtacttaattgcgttatcaaatactctttctatcatatacgaatctctctttttctagaaaagaaaagataagacacttgctgataatcttaagaaactttatatacatgagtgacccaaactccggccaacagaagacacacgctccgcctactaatttttcactatgtcagccaaagtatgacccgaaatacaatgagacgactcgaaccttagctcatttgtggcttcaccccttgattatattagtgttacagaatatgttaaatgtgacatcttatccgtgttagttagacacttagacaaaccaacattgacatagtttcctgttcacatgaccctgcgcgtgtataggattagcaagaaaattggtactaataacaaaaatagtaaatcggtgtaataaaaacattatcaatgttggttttttagatgaaccgcactgactaagtaaagacgaaccgatcaacatgggaaaaattctgtaagcccccttgttttctccgtatctccctctcactctctcctactctctcctcctcttcatggcaagcgccgacgacctcctccacacgggttggcgggcagacttctccaccatagcaactagcaagggacagtacggtggaggtgacctcagcctcaagtgccatcttcaatgcggagaattttcagaatatgccatcgaattcggactgctctcaggaattctacttttagaatacgccatcggaacacgaattttcttcgttccgtgccactccgtctcttgagtcagtagcgtcgtcatcttctgtcgcccagcgccgccgtcgtcagtccgccaccacccgtgccggcactggcatcgtcgtcgtccaccgcccgcgcccacgcccatgtcagccgcggcgtcgtccgttcactgtcgccaccatcatcgtcgtccaccgcccgtgccgcgcgcgcctagccacggcgtcgtccaccgcccgcgtcgcgcattctccggtggagcacgccgatgagggtgcacatgtcctcgtcctcctcatcttcctccccaccaccaccaccaccaccgacgccgcccacccgctgcccatccccgccatccacatggatcttcacccagatctcgtggtaggaactggtgtggatggcgagcgtgtactcctagctcaggttgatggtcaccgtcgacagggggcttctcccccacccctttcccgctgcgtagccacccaattccacgtcgcccccttgtagcactcgcggcggtgttcgagctcgtgttcgcgttcgcgctactggtggtggcgttcgcgttcgtaccctcgcccacgccaagccgcctccctccgcgcccatgccacgccgttcccacagccgcatcgaatcggtagattgcctgattcgccgcaatcgccgcgtcacgcgacacaagcaagcgcaggggcaagcgaacggacgacaccgcggctgatatgggcgtgggcggtggacgacgataatgccggcgacggacggacgccggtgcggctgacacgggctaaataattaaggtgtcatgcatgtaatagtatgtttagtactatagtaggagcttgcaaatctttcttgttcaatcaaggatggactcgcaacacgaaggcaatgatcatcaggggccctacacgaaggcaatgatgcatgatgcacggaggcctgcagggccgcacgcatgcacgtacgtacgcactcaagcaacggaatgtgatgcacgtgcgtgtgcgacgtacagctagcgttaaattaatgaaaaccaatcgcctttggagaccggatcaatcggtactgtgcatggtcctcatctatctgagtttttctgaagaggaagatcgactgatcgagttggatagatgcaaaagtcatgctagctaccttcccctgtaacactactctgcatgcaaggatttatatgtgtttacttaatttgttttaaatcaaattcccagggagggatttaattactggtacagttttaattttcgtttgaagttaaaacatagtacatcatgttttactactccatcgggcttcacctttttttaaaaaaagtttgatcgagattataaaaaacataacaaggtttttaacgcaaaataaatatagtactaaaatatatttaattttagatttaattaaaataattgggtaatggagatgttgttacgcttctttctacaaatatgatcaaacctaagtaaaacatactataatatgaaatcgaaggaataaaaaggaaaaggttaggtgcctgatttgctaactcatctaataggagtagttgttaaaaataaatgacaggtaaaaaaattcattaaaatgatgaatgcagcaaactgagctagctcaactagattccttactgtagaacttattcacctaggttcaactcctagaattcgtatgggtgcttgcacatgtacgacatattattatttcagcggtaagtgatatattcattgataatggggtgtgtccatggtgacttcgtcaatatcaaaatatgtgttatctcgaaagtgttcatgaatcatgatatgccctttcttatagatgcttcgtatatatgtgagtttcatcaattttaaaatatatcctttttcagagatactcattgtaagtggccaaacgggcggcctagggctgggtcgggcccgcaatggcacggctaatgaaacaggtggtgtgctggcccacatgcccatgtcgaagctagaccatgacgtgccgacacaggcatgttataggcacatgagctacgaaggcccattagcttgtacaaggctcggacgttcgctaaagaaaaaaagaaaaacaattcaaacgaagtcgcaaagatcgttggggttagccggttagggttttgctcactgctgcctcctgctttgtccgtcaccgccgcctgcgaggttgctcgaagaaagctctacagtgcgcgcctcggttatattgtcgtgcctctatttcttgccagcttcacgcctccatggctagcctccacacttactggtcgccaccaagaaacttatcgtcctccgttcatacactaacaaccgacgccgcctcttctctattcttggtgcctgcggccgctatcatgccatgcggcccaagttgtattgtgtcggcctaggccgctttttgtcgtgtcgtgtcacgtacgagctgtgatgacggcccaagcatagtgcgactagacgtgtcatgcttgggtcatgagcagttggtacgtgcctaggctggcaaagggtggcccgacctatttggccaccaatataatgcttgtatgggtaaagtgaacgcacagtgggttctacttaagaaagttctgagacaaatataggtacaccaccaaacaagtagaaggatatgaatagtcttttctctttacccttcattgttggctttgaggggctatgctcggagggcctgtttggcatgactgcatgactccagctctatctccacctctcttagtgttggggttcaatcaaacagtttcagctttaaccaaaaaggagtgaagttggttagagtgttctcacaaaatgaattagataggtgaatctaggtttgggatgctccacagctttactcccgacccaacttttgaagtttaggagttgggattcttaccaaacaagtaagaattcaactcagtattgattcttacctaaatgtaacaacctggtattttctttaagtacattcaactcggtgttagacacaatttatattgagtctactagtattacaaggttgcggacttactccctctgtctaaaataaaatcaatataggttgtccaaattcattatattagatgatgttaaattctcacctcttttttaaaaaagaaaaacagagaaagtagcagggtgtgtgcatagcatcgattattttttaaatcgccctcccatgtgataagctcggctgaccatctgcgaaaccccagtttgaccgtcctagctagcagcttactaggcggctgccacacacattccacgcacgcgccgaacacagctgctgctgcagcatgcaggcgctgaatgtttttactcctactactcatcatccgcgtgatggcccacggcatgcagccgctctcatctctccacgatatatccacatgctgctgctcctgccggataaacaacggctctcgatcggtcagactcgccaccacaacaaacacgccgagaacgccgcgagagaagagatagagatatcctccatccatcctccccgagaacgccgcgccgcagatttgcagcgccttcgccgtgtgggtgtcggcagcctcgccccggaaccaaaccaaccggaccccaccccacggtcaaaccccgcagcagcgtggggtcccctcgccacagccagctaagcaaacgcagcacgcgtcgccgcgcggctcgccggaggtggggaggggagggagtacgtggggcccgcccctctctgcgcgcggatattcccgtggggcccacgtacgtagcacgcgctctcgcacgcacggtggtcagtggtgggtggggggcggtggggttttgggtcgtgtactcatgcctggcgggtggggtcccggggagctgctatgaggtggggtaggcggtgtccccggtcaaccgggcatgggcgggggcgcacgtgcggcccagctggcacgcgccttgaccgcatcgtgctcggcccggcgcgccgtgggggggcttcaccctgtacgggatcccggccatctttcatgcaacgacgactgaccgtgtgctgcatctgctcactggcgaccctctctactcttgtccatgcatactggactagtgtacattttttttcccggtgtttcttaaattagaaacttagccctcaaataatctaatatgcaattcgtttatatagagattcgaactcagaaccttagtgtgctactcatatcactataatcactaggctatatgatatttcactagctagcatgcatggttttgtgtttcccacaaactcccacagctttgcatacatgtttttttagttccgactagtacgagtatatgaccagcattgttgtcggtcccacgtataattacattgtcgcttaaagtttacactttcatggacgcgtggtatacgtgaaagttattttttctaaaatttctagaaaacttccgtaaattttttgcccctaaaatttcatacattttggtcattggatcacctcgagatttgtgcatgaagggaagaattactagaaagaaatttcacacaaatcgtacgtaagatcctaatattaatcaaccaaaccatagtggaatataagttttatatacgtcatatagttatcatgtagttattacattgtaactatacttcacttcacgtatactataattacatttcaaagatttcactcaaaaaacatacgacatttttttttagtattcttcttaaatctagcgatgagcagtgacaggagaaaaggattttgtgtacacacggtattacgtgaagtactagtacaatacttctagtctagggagtaatagaatttgtgcatatagggagtaatcatatgaacttggaacaaaagtaatctctttaattccctccgtacctggaatacgcttcctccggtcgttaatgtgagtaacttttaaaattacgtaaaatggttatattttatcttggcacacaggattagtaattatacttataatctatttaaacatgctacttgtcattcctcgtaaacaaacgattcattaatactccctccatctacttttgatagtcatatttttaaatctgaaaaaattatctttgatgggcatatttcaatccaacaacctatcctcttaatggctttctcggatttaatgtatgactctccattcttccgcacaagattggttacatgggcatcgagaaatgtaaatattaatgaatcgcttgtttataaggaataactagtagaatgtttaaatggatgataagtagaattacttatccttggtctgtgtgccaagatgaaatattactatcaaaaatagatggagagagtatttacatttctcgatgcctatttaaccaatcttatgtaaaagaatggagagtcacacattaaatccgagaaagtcataaagatgataggttgttggattgaaatatacctatcaaaaataaatttttcagatttgaaaatatcgctataaaaaatagatggagggaatactatattgcattcatctgattcaaatgaattactatatcatttctttatttgtctctataaacgtttgttaagaagcacacatatagtataacaatagatgtgttgaggtgtgtgtgggtgtcttccgggtaaaagttgcacgtgttgttcagagagagagagagagagcctcggggactcggggtgcattgatcggtgctaatactcctacatgacaccagtacagcacgcacgttgatgtcgttgttgattattgggtcggtcagaactaagaatgcgtagagtgtaaattaagtttggattaatattacaagctagcgcacagtgcaagctttaatttcgcaccgacgcatatatgcagctggtggtctttgttccgtggtcagacgaggaggaggctggtagccacgaatcggccattgcacgcacgcggacgcggtacagtaccatacttgtgcatgcctttcacgtcacgtaccagtgaactgcatgcgcgcattcgtggagtaatggtgcatggcccggcagatctttcccaattgaccttacctctggggattactctcgcaccgccagctactctactactatactcctacgttacgatggatggatggacgtacgtggaggtgaagtaggcacgtcaaactcgaacagatggcgcagcgcctgcgcgcgtcggaacttggggcagggacgacgggattccacgtacggctccaccgcacgccgtggtgtctgtacttgtgtacagtactcctcctcctccggtccagcttgtttcgtcgggggcccgggctctgaatccatgtcgaccgccgtatccaatcgaagcatcagatcaaccgtcaaatcgcatgcagcactgcactgggccactgccgccgctgccgcctccgttttgggcaggcagcggcccgggccgcactccctcggtggtggtcggatgcatggagccatggaggcccaggctttgtaggcctcgggctcggtgggcgtgcggcgggtggagtttgacggtcgtcgcggtacttgccttccgggctctacgcgcgcctttctggcctggcctggcctgcccaggcgcccagccttttcgagttccaggttctcgtctgcttcgatttgatagccgcagcaggagactgtcctggcctgttcaccacctagtgtagactgaaggatttttcacaattcggtcctttcacaaatttcacaaataaatctctgaaaaaacttatcccaaaaatggtcttttttggtgactgagtggctggcaccgtcgtcctgccaccatggtgggtcagcgctgaggtggcagggggagcgcgtcaatgtggttggcgccatccccccggattttttttatttttttgatactttttatgcttaggaggacacaagaaccaatcataaaaaagttaaacttaaatggatgaaatatgtgacgtgtagaattttcttaagctctacagaaaagcttcccgcctcgaaaacacaatcttgcaagcggaatttggaggttctaatttcaccgaatccagcaaagcaggggagaatcagatgtaactttttctgtagatatccgtggatatatcatttgcctgattccgagtcagtatgagaaagttacggttgttttaagaaatgacacccgaacgtaacaaaccctaactttttttataggaggtaaaagatgtaaaaaaaggctaagcctaagagtgttcgaaatctaatctaatttttttggggctatagaaaaaaccaaaacaacgaagagcagggaggggagcttttcggtatagctttgaaaaattctacaagtcacatatttcgtccttttgaatttaatttttctatgtgtgctcctaataataataataataataaaagttgcacatctctctcctctacactagagagagaaagaaatggcgagaggggggcggtgccagccacattggcgtgctccccctgccacctcagcgccgcttcgccacggtggcatgaggacggtgctagagaggctggcaccgttctgttggacgatggtgccagtcactctggcgctccaaaagagacaattttcgagataagttttttttagagtctatttacgaaataaattttttaaaaggaccaaattgccaaaaatccacgtgtagcctgtgtactccgtagtgagctggaatagtacgactagtctactagtacgagtactactaaaatttgatcattttttaaaatacttatatttataaatggacatgtagaatttgttgaaaaatggttccatagttcggtgccaaagttaagggctactagttcggaacataggtagaacaaatataggaataaaaaattacatagaaatattatagagttgcacatgaaaatgaaggattaggaaatatatagtggaattttgtaggattggatattggaacataagaatagaaaaaaaagagtaaagtgcattggcggtccttaaacttgtagggttgtgtcatataggtccctaaactctcaaaatgcatatccaagattcagaacatgtcaaagtgtatcatctaagtcccaaatcgacacatcccctctaggattctatgtggcactgatgtgacatgccatatggacgtgacgtgtccttttattttttttcttcttttctttttcttttttttcctctcattcttcttttttttttcttttcttctgctcgagttacggagaaaggagaagaaagggaaaaaaagagaagaaaaaaaagaaaaaggaaaaattttaaatgggtcccatttgttagtcaaaatgatgccacgtcatgtccgtgtggcatgccacattaatgccacataggatcctgaagaggttgtggcgacgttggacctagataacatactatataggctgtgtttgcatgagtgggatgggaacatattctctccgcacggaaaacagaatggtccattagcgcgtgattaattaagtattagctatttttttttttcaaaaaatggattaattttatttttttaagcaattttcatatagaaactttttacaaaagacacaccgtttaatagtttgaaaagcgtgcgcgcgggaagcgagggagagggggttgggaacaagggcttgcaaacacaaccacaagttctaggatttggatatgcattttgagagttttaaaatctagatgacacatccctacaagtttaaggaccgcccgtgcacttcactaaaaaaataaaagaggattccatcctatggcaaccaatgatgataaaaaaaaagaggctggagtggatgtttggagctctttggaatttttgtgttttcataggaactagggtttggtgcgggtggccgaaatctgcgccgtccgtttctgatccgacgatcccataggtgtgaaagggccgccacagtagacacgtggacggttagatcggctcttcagcgagatcgaacggacaattattgtgggaaccagtatgtaattaacaaaaacgcatgggctgttttgcaaaaatatgctgatgtggcactctaatacttcaacactcccacgacgtttagagagattaatatgctacagtattccttcaaaattcctttgtgtgattcctacaatccgaacgtgtgaatggtaccagatccaaaggaatcatgaatcctaaaaaatcctctgtaaaccctttgatccgaacaaggcctaaatatcttggtgcctaaacccggtgtgataaaaggtgcatgatatgttaggccctaaatatcctaccaattatttggtaataccaaaatgtaggcatgttttggtactattaattttctggtaggaaaaaaatgcatttggtcctatttggtttatcaccaatttagagcccaaatgtgaaattatagtgaaaaatgttctagactgatgccaaatctagtatggccattaccaataaagtggcttcaatctagatatgcacaagtacttttcaaacaaaaaaacattggcagggcatgttttggcagcaataaagacctcttattattgaaaaaggctcctccattccaaaatatattgggactattcagttgctatttaccatgctatttcgcactctctagccaatttgattgttgcagcaagtagatagctgccgactgtgtagttatgctgtaaattgcagccaaacagctccattaactacgaccaaattcgtagtacttataatacgtattatgttcatttggttcctcctcaccaagctttatgtttattggtgtcaaataaatatgattttctgatttatttcttataatttgattatatttttttaagaaagacttgaatttgcgatgagagtgaagcggaaggtcagcgacatggacactgcagttgacgctcgatgccgaccagattggtgttgagaattgagacatcacctggcgctaatgtgattgtttatttgtttgtcaaatgaccacctaataaggaaacgaaaaaaagagaggaagaaacggaatgaactagctagtaaatgtcttcctgagagagccccacgatatgaacagcttataactcttggttccaatgtggcccaagaggaatgtaacctcctaaaaaaggaataaaagtccacttcaggtccctcaatatagcttcagtattaaaacgtgcaatttaactacactagtaatatgcccgtgctaacgctacgacgatatttgatgatgcaaatctcttgtcaactactataaaaactgaaaatgttctcgcagaattttggtacgtcatccgtattggaatcaattttaattttatatttctatcaaattctttcttttttcttatgtcagagtgtccctcttatccgagacgcatacgaattaattaggcccgcaccttttcacgcgccccttgccgcttaccttttcacgcgtcccttgccgcttgcagcgatcaggtccacgcctgagtccgttttccatatgcgcctttgtgtgccgccatgattggcccgcaacgccctggctcgtgatttttttgcatgcctggttgggcccgcaacgtcctcataaatctaccctattagcatatataagcactttaaaggaaaaaatcgagattcccagttgatttaatctttgggaaaaaaagaatacagattcctacttgatttgatcttatcaggcctctatttacctacatgatatcatcaggcttccatttacctatatcttcttcaagtttattggacaacctaattgcgattaaattgcatatactttagttatgataattaagaattagcatttagttacaagacatccatcattgatattatttggatgcgaatcgacgcacataccttttgagcccatgggaatgagaatatgaagaggaacactgctacagacctagggatgaaatgctccaacaacaaatggcataagcacagcagagccataatatatagaagtggccatcgttccattttactgcctaacgataggttgaaagctagcaagccaaggaagggctatatatctctcagttctcacaactaccttttcatgaaccgtgggcttttttaagctaaacctcagaagacaataggaaaagcctgtttttcatttaagaataaaagacttggcctattattttagggaaaattggaccaaaaaactcacaaacacttgcccatgaacctgcgggctaaatagtgtaaacttatctgctgcaagcagcattggagtaaatccaccctatcctaaacctttcttacatgcatattgttagtttgtaccaagcacaagaaaataaatcactcactttaaaaccaactaaaaaaatacatatatgcccactttcatccattgaaggcatagctgcaacttataaatctgaactgtacatatatgtgtcaaccatgagtgtacaatcgaaaggggaaagaatggaaaaacagttagaagaaattatgccctagcattgcctccattttctctgcactgatcgaataattgcatctaccttgccattctgcactgatttctcatgacaaccgcacttcatttagcaaaaccatgaaatggagcatgttcctgtcaacctgctaaatagaaacaatcagcttcttttgttaatgagtggcttccaagcttaacttgttttgctaaacttttgaagcaaatcatgctagcttatggtacaccacaaattgatatatcagatcagtgatgatcaataatgctatttgctttctaaacagataaattccataagtaacagataaatgcagttgttttatcttgcttgttgcttggtaatcactattaattggaagcaccgtagaactcaaaagcagaggtcatctctcttgaagcaggtcctcttaatggtgaaaacatatgtaaagagaaatgagtacagatcagtggtgctgcatttgaattcctctgcaatggcaatagtccagaaaaaacatcaatttcaaagatcttcaaagaaatcgagggcagcgttagtctgcactgggttggtaagaaccgtcggctagattggttctggaagcaagcaatgatgctctgttagcaactgtactttggaacattgggtcatgcatttatggaaaatgggagatagaaaagcgggaatgacaagcaaaatgaccatatgtttgaaataccagctattcttaatttcttatacaggaataaatttatatgctagtaaggaaacaataatcttagctctcacatcaccaaacaatattgaagcgatgaactctgacagtctgccattcatgtgatcgtgcaaatcagttagcgtactacttaaattaattacaggaaagacagggtaattcaaaagcacatgcctgtaaaatcacaggatattttattcaagtagctaaaatgcataacacaataatatgtacccatcggcaaaagaaagtgcatgcctgtttgaatggtcaggagcagtggaggacaattgtcatcatctccaacaatggtgttttcttgagcagaagattagcttgttccaatctattgtgataccatgaaaaaaaatggaaaatttttagtacaaatcattcaggctgaaacaaagattgctaattactttagaaataaattcagcaagcagaccatcagtggattaatgctgggttagctgtttatgaacaaccaacgatggcaaattcaatggatgaagccaaatgagcttaacctaggccgctagaattcatgaaaactcgaattgcaataatagttaagaaacttcaccagaaaatttcctcgcggtcgtaggagacgtcaagccaggcacagccgagagaccagccaagcgtggggcggtgaagcccgcggtctcaggtctcaggaacaatatcgtcaagcccgacggaggacgggacatccgagccaggggtcgcggaatcgggagcgtcgaggtggaacgacgggctcgagagaacagaatcgggcgtatcaccagactgtcgcggagcgagcacggcaagaacgaccggggcgcatcggccaccacggaggcggaccagtcggcagctaccggcggccgccgccgcttcggaggggtggggggtgtcgtcaagcatgaaggttgacgccgcgagctgccgctgcttcgggtctggagggggaggcgtgggagggaggtgcgggttccgcgtcctcggtggtggcggggctgggcggtgcggatgcggcggcgcaaaccgatgtgatgggaggaggggcggcgggcggagggaggtggcggcggcgagatggagggcggcgaattttaactattttcgatacatgtaaacaatgtcatatctacatatctatctatctattattaaaacaaccttaaaaaaagacaccacgttcactgtagaggctaaaaattcctacatgaatcggagaaaaagaaaaaaagagtcaaaatagaaatacaatctaaaaatagctgaaattcgtaattaaaaataagcaatattaaaaaaatagtccatatagtaacccaatacgagattaatcaaaattcagaattaaaataagagtaaaatacacgagcggtccttaaacttgtcagcaggtttcacttaggtccacgaacttacaaagtgcacattaaggtccctaaacttggtttattgtatcatcccggtccaaagccgcgtttaaccgtggtcttgcctacgtggcacgccaagtagacgatgacatggatttttttttattttttctcccttcttctttctttttttctctttcttccttgtcgaaaagatgaaaatgcctcatgcacgtcatcgtccatgtcatcgtcttttcataaaagagaaaagagaaagaataagggagaaaaaatattaaaaaaatccatgtcatcgtccacgtggcgtgccacgtaggcaagaccacggtcaaacacggctttggaccgggatgatacaataaactaagtttagggttcttgatgtgcgctttacaagttcgtggacctaactgaaacctgctgacaagtttaagtaccgctggtgtattttactcttaaaataaaataaaatccgaaattagaaaaaaagaagagtccaaatagaaatatattttaaaaataactgaaattcggaattaaaaataaaaaatattgaaagaagagttcgtataagaacccaatacaagattaattaaaatttgaaataaaaattaaataaaatctgaaattagaaaaaaaataaaagaagagctcccgtaggaatatattttgaaaaaaaactaaaattcgaaattaaaaataagcagtattgaaaaaatagtccataaaagaaaccaatacaatattaattaaaattcaaaataaaaaatcaaataaaatcaaaaattagaaaaaataaaaaagagagtttaagtaggaatacaatttttgaaacaattaaaattggaaataaaaaataaatattaaaagagtaatctatatagaacacaatatgagattaattaaaatttgaaataaaaaataaaataaattcagaaaataagagctcaactagaatgcaatttataaataactaaaatttgtaataaaaaataaagactattgaaataagagacaatctagaacacatgacgagattaattaaagttcaaaataacaaataaaataaattttaaaaatagaaaaaaataataagagttcaagtaggaatataatttatgaataaaaattatcgggatgaaaaattatgcaattttcaaaaaacaatccatctagaacataacaatgacaaataacaataaagatgagagaatcaatagggctataaaggagtagagtgttggcagttgatgggatatccaaaaactataaacaaaaccccaaatagaatcccaatgatgatgggcatgccgttatgcaacatggttacgacagttgatgggacttttggagagtaaaataaatccaatgacaatcatgttcgattttaaaatctcaataacaataaggaggggaggcaacgggcgggctatagaggagtaaagtggcgaagccgctaatgatttgacgagacttataaaaagtaaaaaagaacacaaacaataattatgttcgatttttaaaatcccaatggcaataaagagaggtggcagcagatgagccgtagaacagtaaattggcgatgtttgacgatacttctaaaaattatgaaaacgaaacccaacaagacaatgactctaaagactagaaagcctattttttaaaagtttataaagagaatgaatataaatagtggtagatcaagtaagcaaataaaaatgtgacaaatgagtaaggggtagtgactgacgtggattttaaaaattataaaattattagaataacaggaatgataattttaaataaaatcatatgtgaaaaatagataattttaaattgatacgggcagctgtaggatcaaggaggccgactagagggggggtgaataggcggttttaaaacttaatggcacttaaacaaaactaacctaagttgctaggcaaggtgaggtgcaaggttaactaagtaactaagttaagttttgcaaacctaagtgatatgggctcaaatatgtctctatgaatgtaaatagcacaaatgtaaatgcaacaaataaatgagacaagagacaaggaatttttcaccgaggttcggaaaatcgccggtttcctaatccccgttaaggcgagcctaactccaccgctcaaccacgaagccaccgcacgcccccttcgtcaagggtgggcaaggcgggagccggcccacggagaggactacccaagtctcgatcactcggggtagttcttccttcactccgaaggtggtgaactccaaaccactcacaaacggtgccgggcctcctccacaatctcctcggagaggtcacagggcaacacctccacaagccatctaggaggcggcaacctccaagagtaacaagtctaggatgcttgccgaggatgatcaagtgccacactagctataacaatgaagcaatgcacttggattggcttaactcactctctaacacctcactagataaactaagtgtacaagggtgtgagagctcttgcaagggttcaagataatgcaatggagtgccaaaaccttacccttgctgctggggagtgggtatatatacccccaaccaccaaaactagccgtttgaatcgaaatccccaactttgtgctctgccggtcagaccgccgttgtgaggccggttagaccggactactttgtaacggctagaaaactagtcgttacagagcaatcattgagtccactcaacctggccagtctgaccgcagtgtagtggccggtcagaccgtccacggctcagtcagaccgccgtcggctcggtctgaccggttgcggctctggcagctctgtatcgccaccaaaaaccagaccagtgcaacagaccagtggggccggtcagaccggccttaccacgccggtcagaccggctaacagacccggtcagaccggcctaaggcccacggtcagaccgcaggttacttttcagctcaaccgacagttagtaaaacagcgatatctcttgactcgggtctcggaatttggcgttcttggactctatggaaagcttattcaaagggccatccaacccatgaaaattccatccaagaaacacaacttaagtcaaggataaagggctcacactccaaaggatatccaccggacatacccacaagatgtcactcactcctattggacatgcccacttctctcttggtttaggacttgagaaaactcatcacacttggttagacaagcccacaaaatgcacctacatgcatatgaactaatatggcacaagatcatctacaagctcgcttcatagacccctcttaataatacgacgcctatctagcaaatccggtctacaccaaacaccaagaccggaaaaagactaagaaaacattcttagctacattatacctttgccttgcgccatccatcttggggtcaagcttgagccgagatcaacacttgtgaccatccggttgaaccatgtttatgccgaggtcttgtccatcctttgtcaagactttattctcatcacaagcttgacttcattcttgccaacatgacgatgtccttggcttggcgaccactaacccgtggtgtcattcattagcctcatcatagtgggacctattccttttcacacctcaaaggagaacattagtctcaacaaatcggttgtcatccttcacttgatgaccaaccggttgcatatgaaagatatggatatgtttgttgagtattcattaacatcacaagtgtcatatactcgtatgcaagctcaagtgcaaagatccgatataaataataggtgaacaacatggatctagaacatgcacaataaatgtataggatttgctccccctaaatatatgcatacaaataaatatacaagagatgcaagtgtatgcataattagagaatgaccaatgggggtttatcctatacatatagagaaggcatatgtagtaatgatgtagaccaacataaaacatataccttcatgatctccatgttctcaatgtaaatgagactaaataagataacattcgagtaaacattagtctcacacttatatattaataacatggaaatcatatatatgaacctatcaaaaagtaggagataagaagtggtacatatcgttttatctccatgcatttcatccttgtcatgattaaggtccatcacaaaagaatgaatgtcttccacatctcattatcgggaaataacctagtagacaacttatgcaaaagagaggttaatcccataaacatcggtttatcatctatcaccaaagtaacaattacataaattgtttaatccaagatctttcaatcttttctctctttggtgatggataataacccgatataaacaatatagagagatgagatgaaaaatgatttcaaatcaagatagaaatcttataataaacaaaatatagaataagctccccctcaagatgtgcatacatatggatatgaaggaacgcatatgcacataatcaataaagatcaaataggaagctcacactatattttggatccacaagagagaccaagttagaatatatgaagtttaatacatacctctcatcatttttacttccatatccaaatgagactagtcaaagaaaggctcataaaaacgttagtctcacataattagatttgtcattaatcaccgaaaaccaaattaaggcacttgaacttacagcagcccaactagtttggtgaaaaatgtcatatctacataacaagggaatggaatcgattgcagaaacaaccgaagatagaacccataggacaaccaaagcaccggatccatagaggacaagagttggtgtcacttggatgtccagctgaaatgaacaataaaaaaatttgtgtgagcaacagtactaaatgcagtacagaaaaggcgtttcaatgcctcatcccatatagcaaacacaagaacaggcaagctgaatatatagaaatggatgcaggaaagatggtattatggtgatacatacactcgcttcagagttaacagaaatagaaggaaaaaaaaaacaacgtggtacactatacatgaaacaatcatgtgttgggagtttggagctctgtctctgcaaacctcatgttaggtcctaatcacccagctcacaaactccccacattttgctacacgagtcggtgactgaactcaattttacattttgagatctatcataagtatgcatttgtcattggaaccttcaccatacttttgtatgtaatattcttcaactcgtctctcctctcaatcatttgattgcaacaggtaattgggcattgataagccagaattggcgatcaattcagaaacatcagcaggtacaacgagacaataccttgctcaggatgtcgtccaagccgccgtcctcctcggctgcctccgacgacaccggcgcgctgccgctgtctccagagacccgccattagagaccgccgcgacctcctcgctcttctcctccgccggcggcggatcgggcttgtcctccgtgacgacgacggtggacgccgacgccgacgcgggctcctctgatggcaccgggtccggcgacgctgcgctcgcgcaccgccatcctcgcgacaaccatcaccaacagcaaaaccgtcaaaacgataatcaatcaatcaccaagagagagaccggggggcggcgcgaatgcaggccggcgacgtggatgtgtgacatgatgaatgagtaaaaccatttgttcaactatagagtagatagggtagatcagtggtttcgggagtgatttccgatgacatgacatgtagacttggtcctctatgctgagtcagcatgtgggggcccacatgtcatgcatcctctcttcttccctttgttcctcaccctctctccttctcttctcattctcaattcgggttttgacctttctttcctggccggcttcaccacaaagacggcaacggtgagaagatgagggggagcagcggtgatcgacgacgacgggaagtgccggcagcgactagggcatgcgccttgaccggcgtgcgagcgtacgcggtcaccgcgaacccagcccgtggcgaggaggagacgcgtggccatggcgccacccatgacgccgatgcccgtgtagtccctggccgcaccggagcagggaacccaaacgtacgccacccaccaccgccacgtctaaacctcactcccacgacggcgggcgcgcggcgagaggaacgtcgcccagcttaggtggcaccacggggggcccgtgccaggggaggcggacattggcgatcgacggcacgaggtgtgcggtttgtgcgtccaagtggagaaggaaatcaagggagccaaaccaaaggaggttgtcagttttgttcgatcatctctctcgcctcatccattgcattttcttttcatcctagtactttttatgataatcctagtatgaaatcagatcaaactctttctcatttgcacttcaatatggaagctttgttttctccgattttattttttcagaaatttctctgtggccggcgcctgattttaagggagacgaagtggatttactcccctgaaaaatccaacagtgccacgatggtttgcttgtgtgcatgcacttaaaaccaaattggatctcctcgaccacccaacgtgagtaaccctgcgctgatttatagctggactgccgttcctgtattttctttcacaggccacaatgggccctgtcccacttgtagaaccggagtgggccgttgtcctgatgggccggggagcagccgcttcaggctaaagcctgccaacgcaaacaatactacagtaggttcgacacttgctgggattcctatgccttcgttgtctctttccgatagtttttctccatttatttttttttcatacattacacggcaagaaccactacacatgctacatcatactcacactcgggaatacgcccattgacgcacactaattaaagagatggaaaccaatgatacaccactgatcttactaaattctagttgaaacctatttatgtgtgtgcaatattcatggacatcagaatttaaacatttttaagtggggtcctgcatccacgactccaccactacaccaccggtgctttttttccccccgattatacaaggtgtacccatacacttaccattttgtgtaaacatcagcgaacatcaattcttgtcctgacattttatatgttactgacgtctagatatccgtttaatttgctataagatcaaagatgcgattttgtatccttatgatgactcctttttataaagggtctcaaaatgccaatggatgggacagttctttacttcttttcctcatttttagcatggttgatccacaatcttgcattcatgttcgtcaacaaaagtatctctctagtgtcaactaaaaaatcttatcctttcctcacatatctttaattaagtaagcacaaggttgttacaccgtttattctcaaggtccaagctttcaagcatttatagtgttaagttgttgtacgcggtgtctttacagatttattcatactccattgttttcttagaaaaggaccagttagaagatgaagccaaatgatggagtcctgatggtgtgagcaaattaattagtttatttcctacctaccattatgtagaggacttagctagacaaaatatatgggtcatttgtatgcatattcaagtggttcttccaagcccagctggccacccagctgatgacgcacaatgatttgcactgattgaactgccactctgccagcgatagctgatttcagtttttgattttctgcactgagacaaatctccagccagaaaatatctggtgcgaaagagtgtgccgtaatcgagaaaattggcaatattgggactacaaacatgggggcttcgctgttttgacactccgagtggatgacaaatgggcccatctatatctatgaaatgtgggttcagtgtcattatagcaaaggttaatatttacagtgtcataattgcaaagcaaaggttaatgtttgcagtgtcataattgcaaatcccccaccgtaatctggggtatgcaaaatagtagttatgaaaagttcggagaaatatcaacaaaggtgattacgtccgatttttttaatctaaacacatgcagcccttttattatgtatttgagcacacgatattcgtaattccatttctaaacatgtactacatgtacaggaccacgttgatgtaggattgaatcacaataactaagccaaccagagaggggtgaatgattggtatacccaaaaaccgaaaacttttagcagaaataaaagttaccctcgaaatcgacggatcgcggtctgaccgaagttgtcctgccggtctgaccgcctggttgccatcggtctgaccacgattatatatccagtccgaccgccgagatcagctgctgctcgctgtcgccgctgttggctgaccgccgtgctcccgccggtctgaccgccgcttgtcgccggtctgaccgccggtagatcactggttagaccgccgaaacctggtaaacataaatcgaagaactcttaaagtggatgacgactttattgattctctctgtgtttacaaagtgcaccaacaacactccttacaaaaatttcgactaaactcgaaaccctaactcaaaactcaactcgattgctctcaaaaacgataccgggaagcctcacgctccccctctatttatacatgaggtaggcagcctaaagctacgaacaaaacttatactaagagtcctaaacactttaggaaaccctctagttcaagaaagaaactttacataaccaatcgtaccaaatttggactccttccaaattcgactccacatcccatacgcacacaatacctccatcatatgccatatggaatctccatcaaccacgtgcatcaactctagcctaagtatcccgcatgatctctgaccaccacggacatcgtcttatccccaagccgactcccggtccatcaccgcaaatactctcccgagacatcgagtcacctacacatggaacaaacaaagaaaccatattccgagaccaagttatcttcaacttgactcattgttagcaaacaacagtattacatacgtatagtatccatctagaagtcataatcatgaaataatcatggatatccaaacaaacaacccgaaaccgaaactgacacagtgtcggccggtctgaccgcgcgcataccgccggtccaaccgactacaagagcctggtctgaccacgcgcataccgccggtccgaccagctaccagagctcggtctgaccggtcacatgaaataatgaatcctgcgatcacatatgaaatccaatcatctccaaaactacttcgtaaataaattccaaataacaaaaccaataatctccgatgtccaattattcatcacagaataatcatcaaaaacacctttgattttacagtcaatccctcaatctaatgcctaacaaaataaatggaccaataacgtccacaagttagcagcccggtaatgtaaactcatttatttgtaaactagtagcaatttttttaggtctattagcttgctatattcagattatactttaaaaaatgtgtaacaatgatttgtaaaagcaaaataccatattttgaaccatacttaataaatatgtcaaacattaatacaaagtaacaaaactcaattcagtggcctagctattattttgttggacattatattatggaacaacgcttggacattatgttatggaacaacgcctgcacttgcgtcttgtctacggattgaaatataggtttgacctgcttatatttggaattaaattgacgcatgtgcttacatgtaaaaaaaatcagtgattgcgccattcatcttttttaaaaaaattcaattaaatatataaaaaataaaaggacaattatgttttttctccctctgttaaggttgaatttagatttgaattatgcagagtgacagttgcttataacccttagtacattctctcagaattttcaacgactatttgtaggtttttttttttttttttacaaatgaaagatggttatcgtagggcaactttacgaataggcggacctatataactaagatgtcaattttaagtaaattttactatacatcactttgctatttcgcttttagaccaccatttaactaatgtttttactttggatcggataatcttacatttgtgatactttggaccactgttaactcttttacccccatctattttcaacttgtcatatgtcaaataaacgatctacatataactacacgagtttattgacgagtagaagctgccatactcgaaattattcttatactacttacagtactacaatttgctccgtaggttatagatactcataaatcattaatcaaaattatttttactagcgataatatagaactaccaacaaacaccacagtaaatatactcttttttggatgaaaattaatgtttttctaccttgtcttccacgcccgttttcacctgatataattctactttttctatacttacacagtttgttcatacaaaagaaagagaagctagcttagctaatgaggagaaacgacgatgctacaacctatgtaatcactagagatcttgggtatacaatcaccagagatcttgggtatacaatcttatctacataaagtgcgtgagcaagctagttagatggagcataattatattactgacggatcaggagaaggtgtagaaaagaaactaggagatattgctgttccaaccaccataaacatgtcggcctgcaacagcaaatccaccttaattattaattcgatgggcatgctctaccactcttaccacgtggatggtagttgttcacataagaatgccccatagctttggtacagtagcttaattctattccactatatatatagatatatatatatatatatatatgcctcagcactgtgctaattaattactacattattagcttaatctggtacttacaacaaacattttgggtgcacacatcaccaatatttcatatctatatatgcacataccgaatctttggtgagaagacatatcatacctttctcacaaccgctagatgtacaaatctgtacaaacataataagtcctggaaatataaagaacaaaacatatcatacctttttcacaaccgctagctgtacaaatctgtacaaacataaatcctggaaatataaagaaaaaaatgcagagacaagcacagtgttcagtgtgcgagagtggccattatttcctgaagaaaccaaccgatgcttggtggctactgaaagatgaaagatcaggagtggtttgctgctcaaacagctgaaaacggcatgattaattttcacacattatatgcaacatcaacatgctacggcaattaatccaaaaagaagctcgatcctgctctgcttagaaatatgcttgcaacaaaataatggtttcagtgtcagtgtaccagtgtggggagtaaattatgttcgatctggacatgtcggtttgaattgatttcttgtggtccgagattttcctggatttaagatgggtggtgttatgagcacatggttgacctggatgctgagtttagcccaccctaatctggtcagcagtcatgacaaaatcagccaaatttcatgacagagaagagagatcagagatgcatggcaattagcttaagcatttgtctagtacagtagtacgggctgacatggaagaagcaatgacaaatgctattccttccccccatcatctgaacatcattagtacttaattaatgtcgacattatcaaaaggatgatgggtcaacaaatttgatacggagtagtattaattcgtacttggagaaagttgcatatagcaatttaattattgatatgcaccatgttgaaagtggcatatcattagcattataatgagaagcgtgattaatttatgccttgattagtcatgtttttgttgaaaaaatcgtcttggctgttaacatggccttttttttttatgtaatggatagcgtgtgtaattaaacacgttagcgtccgatggccttttaaggatccgatggcttgaagctccttggtttatgactttattctgctggcttaatagttcatgaatatgttgtacaccatactcaaggtcaatagaggcagttttgcgaacttgatcttgccaatactattcatctctaacctccttttggatatcaaccaggttttgaaaatgtaacttagacatttaatttctatggcaagccatttgaaaaactagacaaaattacaatatcacgaataaatttttcaaggaaaatatgcatatatatttttttctacaaaggaagtataacttttgacttctataccaactaaaaatgtacacaaccatatacaccagaattttaaccttgatggttgaagtcatacactcacaacttcactaccgcatcaatgatgcttccccaaatttacattatatcgttttctttacatccaatctaaatatttataaatctattgaagtttaattttcttttaaagtttgacttgaaacatgcccaaaatgacatgtttctgcgaaaaagagggagaactgtccattcatgtcagtgagagacaagcacaaggtgccacatagctgggggacccaaagcaacctgccctccaaaacatgatactctcatgacagctctatcagatcataagaaatttgcaacatgctctgctctctcatcctcatgacagtaggcactcctcactgtaatccaccaagtaattaaaaaaaatctacactttttcaaattgttgctgctctgtgctagccttttcatattgaacttccacctctccatgcatgcagagcagcaggagcctcattacttctcattactccacttgccaatagtcacctctctctctcactcactctcccttcttctacctccaatctcaaagcctctctctcgtcctcttctatggcaagcttggactgtagagtagtacaagtacattgcccacagtactagtctagtaccatctgttgctggaaaatcctcctccttgcaagcatttcttgggttctcttttcttttcttttcttttctcctggagtttttgttgattcatcacaacaaccaccatccatccagccagccagccagccacatcatatgtcctcaccagaatccaaaattttcatcacaccaaaccatccaccgctcatcacttttcccccaagcaaatccaatctttgcaaccacattgttgttgtttctcccccacaacatcctcttccttttctttccttttttttttcccgtttttgcgtccaatcgcccaacgaatccaaccaaattcgctgttcttgccttcttcttttgtgttcaagaatccaaaagttgatgttgttttgagctcaattttgctcgagaaaagctcgaggaaggtgctcccatgtcggactcggagctgtcccagagcacggtggtgttcgggctccgcatgtgggtgctcgtcggcgtggccgtcggcgcggcgttcgtgctgttcctcgtgctcctctccgtgctatgcctcctcgcttctcgccgccgccggcggcggcgggggccgaacacctccccggtgcagcagctccccgtctccgccccgcccaagaacccccagaaggtcaaggcgcccaaggacatccaggaagtccccgcccaggccaccgccgccgccgcggcgaagacgccgctcgcccaggtgctccagatgcccgcgccgccgccgccgccgccgccgatggcggcggcggcaccgcctccggagaccgtccagatcgccaccggcaaggagcaccgcattacgtacccggagccgccgcaccgcagcggctcgtcgtcgcacggcagcggcgaggcgccgtcggtgccggaggtgtcccacctcgggtggggccactggtacacgctcaaggagctggaggcggcgaccgagatgttcgccgacgagaacgtgatcggcgagggcgggtacggcatcgtgtaccacggcgtgctcgagaacggcacccaggtcgccgtcaagaacttgctcaacaacaggtaccctaccactaatagtagtcaactccgttgcactgaaattactacagctacccaacttgattgtcttcgtgtgattgccacggggattgatcatccaagaacaggtttgtggcgtcaattgcgggtggataatgatgcaatttctgataacagttactagcattttgtattccaaattgggaagcatgtttattatactacaattcggttacatttgatggtagtacctttggttggtagtactttacagttactgaattctgttcaatttagcatgtctggctttctgtaatgaaatttagtaaattttgtatgcttgtcttgttgagttgatagggggcaagcagagaaggaattcaaggtcgaggtcgaagcgattgggcgtgtgcggcacaagaacttagtgcggcttctaggatactgcgcagagggcaatcagaggtattttcttgcatgtgcacattatttggtaaccttgttgaattgcaaaatcaaaaggtttgataatgtaaatggtgtttatgtggctctgaccaggatgcttgtgtatgagtatgtcgacaacgggaacctagagcagtggctccatggggaagttggacctgtaagccctctttcgtgggattccagggtgaagattatactgggaacggcgaaagggtctgtgccttgtatctcattgttgcggcccagtgaatcttgctgccattctatctgtttacataaattctgctgttctgtaggttaatgtatttgcatgagggacttgagccgaaggtggttcaccgtgatgtcaagtcgagcaacatcctccttgataagcactggaatgctaagctctctgattttggtctagcaaagcttctaggctcagagcggagttatgtcactacacgagttatgggaactttcgggttagattcggcacactatgaacatacccctagaatcccagatgaatgttcatggttactaattttttccactctctacaggtatgttgctccagagtatgcagggactggaatgctaaacgaaacaagcgatgtatatagttttggaattcttatcatggaaataatatccggtcgagtaccggtggattataataggccaccaggagaggttagcgaccacatattgccaatgctcgtttatgatcttgttaactggatttatcaaatctacagatcaaacttttcaggttaatttggttgattggctgaagacgatggtgagcacccggaattctgagggggtcgttgatccaaagatgcctcagaagcctacctctagagctctgaagaaggctttgctagtggcattgcggtgtgtagacccagatgctcgtaagaggccaaagatcggccatgtcattcacatgcttgaagttgatgatttcccgtatagagatgtaagtcaatagaagtacatatccacctgtttttccagtacttgcctttaattttgggtgaccaatccctgttaacgtttcatcaccaagcttgcttaacgttccttcagaccatatgacggaatcatctgaaaagctgatttacgattcttgatttgcatgatatctcacagttcagacacttctgagtttacctgctctaattttcaggggaaagcatttcttgtgttaatcactagcaaatgtattgaggtttcagattatatttgaacttatcctgagggaccataatctgttggatatttcatcagctcatatttatgtcgatttatgtctactttgtgatttcaggaacgacgaggcgctcgagctccggtgcaggcaagagtggctgacaaaccggtggccattgaagcaggcgaccgtgaatccgacagcagcggtaacaacagcgcgcgacaaaccgaacccttcagatggagaaacccagagtcctaggcatttgttcagaaattttcacttgatttcttgaacaagaacagtgtccaccactgaagttgcaaagtgctcatttgttgccttcatcaccatatcatctgtacatgccgaaggaacatattagccctagtaatattttttctcggtttatttatccgattagagacacttttgtatgaaaaaagttactcttctaagttaaaagaaatggagcgtaatcaaatcccaatggtataagaaggggccagttgctgcttgtgtcccttgctggacataatactgtggtgtaattttggatgtcagatgccaacttaccaagctaatattggtataagagtaaatatgcaaattgtttataagctactcctgaaatatgcaaagtgtttaaggttgtgttcttccccttttttcccaactcacctcctttttccacgcgcacacttttcaaactatcaaacggtgcgttttttaaaaataatcatattaatccattttcaaattttttaagctaatttaattaatcacgtgttaatgggtaacaccgttttggagaggtggagttccccaactcagcctaagcccgatcatgcctgcaatttttctgtaccactgcacctgggattctgggaatgtctgtatgttgctgtacttttcagtgtatttgtatactccaataaatcaagttcttttagatgttactccaataaaagggttagtagaaacattcaagtactacgagacatgagtgactaggacatgtatagttagcaggtcactaatcactgatggagtgatggacatcaacgtctaatcttgccttggattctactactagattaatacttaaaactctacttttctgttgaatatgcgcctagttgttctcttgactttctatcagatctaccattaagtagagtacttgtatgacactccttccattttgaaatactttgacacttgtaccaaactcaccgtcacaaaattccttaagcattacacggccatccctttctgactgaataatcagcatcgatattttttcatgttaacgttacaaaaactgaaataatttgttttcatcaggaaaagaaaaagaacaattgactgtcggcaatgcatttgtcatgatactgaactaaaaatgattcgcttgaccacatcgcgaaactgccaacaaccaattttgcattttgcaaaatcagatctctactggagattagaacagtactctctccatccaaaaaaaaactcatcttagaaaagaacgtgaccccttttagaataatgaacctggacaaaaggaaatccagatttgttatcctaagaggggatgtgagatttttttagaaaaaagggagtagtacagattagagaaccgatgcaaagcagcaacaatgagaacagcctgaccaaaaatgccaggctacagtacagataagcaaagaacactgtacaataaatgcgcaggagaatccgagacggggagaccctatcaccgtccgccacgtgtccatcggagaggcgggtgtgacaggtcagctccctgcctggctggacggacacgtcggcgtccatttgaccgattcctcgttaggttcggcgtcctcctacctttggtttcttttttcgatcgctttttgtgtgttggttgtttctgttggcttcgctctccctttcgatcatccatccgcccgcccgtggcgcttccgctgccgcgtgcgtgcggtcgctcgccgtcggcgcgctgagatggacggcgaccgtgcagctgccgctcgagtccgagtgtcgacggcgacggatcgcccccgcttggttttcttcgtcttcctgcctcctcttgtgctgcatggttgttatcaggagggacgcttctgggagtgaggattgggattgatatgggagttgcggcagtagctgaacattccgccgtttgtttgggctccttgatttggcaaaaaaaaaaaaaaaaactgagggcctctttgaaacggaggattagcaaaggaattttagagaattcattttcctaaggattttttcctatagagccctttgattcatagaaagtagataggaaaacttctataggattgcatttctatgatcaattccataggaaaataagcaagatgttagatctcttgtgaaactttcctttgttaagtgtatcctgtggtataatcaaagggctcttctctctatttcctgtgttttcaattcctgtaggattggaaaaacatacaacttcaggacccctttgattgtaggattggaaaaacatacaacttcaggacccctttgatttggaggaaaaatataggaattttggagaatttcaatcctataggaaaatttcctaagaagccctttgaaacaaaggattgaatcatatccaatcctttgaaattcctatggaatggacaatcctatagagattttggaggaaatttagcaagatctttaacctcttggtaactttcctttgagtctatctctctcatccaattcatgcgattttcttacgattcaatcaaacggtcattcctgttattttcctacattttcgcaatcatctattttacacttacattcctatcaaaatcctacgtttttcttattcctacgttttctcaatcatacgattcaaaagggccctcaatttctacgttttttctattcctgcatttcaaaggggccctgaaattttggaggatttcaatcctgtaggaaaaattcctatgaatgtctttgaatcaaaagattgaatcttatcctattctttgaattttttatggaatgaacaatcttataaatattttggaggaaacttagcaagagttcaaagctcttcgaaaatttcttttgagtctatctctctcatccgattcctgtgttcttcctacagtccaatcaaacgcttattgctgtgttttttctatgttttgccatcctctgctttacacttatattccttatagaatcatgtgcttttcttattctttgttttttcattcctgtgatttaaaggggcctatgtcgacgtttaatgtcgcgattccggtatttgcatagtatagggatcgttggtactaggatatatgcgagatcgtaataaaagagatggaggcgaggatttttatacaggttcgggcccctgaattgtcaggtaatagccctacatcctgttggccaaagccggtcgttgctcttattcatcataatcacaccagtacgatatttggggtagcctatctaactgttgtcaacttagcggactgaagtatcatcacgtagtcgacaacagggtagtcttcctcctcgaatccgtgcccgacgagatcagagatagcgctagattcctctctttggttcccgtaggtaccatatggggttttcctaggcttatctctgatgtcgatatctggcagcttgccttggtgtatgttggcttgtatgttgatcttgtgtcttgatctattgttccgtgtcccctctcctcctaggggaccttgtatttatatcataggtgccctcttgtccaagtagaactagggaaaccaatatggatacaatccgagtagtccttgtcgtttgcatgtagaactctattcatcattctttatacggaactcctcctatattcgaaggttgtttccgtataagacatggtatgtggtggatcctgccgagatttagtcaactactattaggtatgtggtatccataaccctgacagcctaaacgttacatgagtattttagtctactgcaacaactataggacacgatacctttagggcgtttacaatgcgtcgggcaattttgttgttcctgggatgctaggtaggatgaggaacttcacaggtcataagactcacagtgcgaaatccctgtgcagactatttttagtgggtcacacaggtcacaagtcactttttcatcaacccttccttctctccttcctgctttctcctgacaaattgtagctttctctgacaaattttgaggaggtttgggtggctaaatgaagctccccgttcctggctgctcctccctccatgccgatgtggcttggaatctacgcgctggcgaatagaggctgaacgccacctcaccacactgggaatggccttatatcctttccgatagcaaattgttagctatacttatggtcaggtttggcataaaattgttaaacatcattaaggtcgtatatggtagtgaatgtttccaatttccacttctcatttttttcacacaggtttattaaattgttattagttcattttaagattttttaactaatacttgattaaatatatgctaattcatcgttttatttatgtgtttgaaggttagtttccaacacactaaagaacatggcctcaaacatactcctaggtttaggcaccgcagctgcatcactcaaatgattactagtaattggaaagcgaaagtgtagaattagtcgtgttcacctgcactaataaaataatgtaagttaggtaacatgagacatacaagtccctctctaggaacaaaatcgaggaaagagtatattaccctcgcagcgcacgagatcgtgttacaggtacaagtagtgtagcaatttgcaaaatcagttcagttcacgttgcatcgataaaggacgctagaaatgggtgaaactaggcttttctcaagactagtgctaaaccattgaagttagcaatccatccttttagaaattgtttgtcgttttatgtttgtcctaattcaaatattcataactttaactatcaaaatcaaattaatacaataacttattgaatctttagaaattaatagttagagttaggaatgtttaattaagataaaactgaaacaagtaaataattactatttgtgatcactttctaatcatactaatatgttctaaattagctagaattttaatttgtatgggatggtggtagtagttttttactgtatttttttccaccaacgtctggggttgtgctaggccactgacgctaacaatgattgaggacacacgaaccaatccccttgtagtcctggacgaccctgtaggctggtattggtttggccatgagttagtgttatcatttaagataaactaggattcgtgcacgtgcaaggcacgtataaaaaaataggaattataaaatataaattacatttaaaaattaggaagtataataaaatgccagaaccagtgcataaacatattttgtgaacattcttgctcttcatcatctattgaattgaaaaggctgttaattacaaaaataaccaatagcaattaaaatgcaaaacatattttgcatttttattcaaattaacgccgcgacacagtgtaaaacatattgttttgaagcaccaaaccaagctacagaagtaggactgaattatttattacataaataattatgacctgaacattatgtagaacttgatctctgttcaacttgtacacatcctgaaaaaaatgttgcttggattcagagcatgataacatcaagccatcttaatggtgagcagatgacagaattctgatggcgtctttgcctctttggtttaaataagtgaatcacaaatttcctttcatcagtcataaacagttgtctactactgaatctacaagaagagaaagcacatgtaaaaatccaatgactaagtgacatatcaagcaaaatggataatcatcacaaattcataacagaacactatccagctatccacaaaactggactaaacaaaatcgggttacttccacaaacaatttaaatgtcaactatagaacttaatgaatagatatgcttggaggggtttgagcagtaactaatttaaattactcgtggtgttctcccaagaactgttcaagaacaaacatgcatgtctcacattagttgcccatcgacaacagtatgactaaattccaaataagtccatttttgaaaaattcgaatatcattttataaaccgatttttttagagaaggcctgaaacaaggcccatacaatgaaaaggaaaagcatactggatagctggatcatttttttacatcattaaacacaaccaattcagggatgacaatgctggatttaggagaagctacatttaagtaacttaaggtttcagacctcaccggcagcctgaatgtagattgaaattaaagcaacatcccagcactattagaattcatcactttgccaataattattaaataagaaaataaaagaaacaatttgtcttttttttgaaaaaaatgtcatcagaattttctagtaagagaaagaaagaaagaaagagcaacaatatttgattcaaagcagaactaattttggtctggagtaggctcataaggaaattcagcggtaaactgataatttgttaatataactccaaattgattaccatcttctaagaccaagcttcactttcatcctcttctcatcccacatggaaggatcattcagcttgctcaattccatgatctattcgctaggcccgcaagaaacaataatctggataaatggtcaatgcaaaatttaattttccatcaaaatcaaattgtaagcatgaatgcaagaccagtcagacactggtgtgtgaatctcctgctgcacagccactttttccgtgaaagaaaagcatgaccaatgtttatttgaaccacatccagtgtcgcagtgtaggctaataaaagtaataatgccttgcctgtacggacgatgaatgtcatatacatcatgaccattgttgagaccaaaagatctgctaataccatcatgtttttagcctcatgtttgtcaaatgcaagccatgattaattaataccatcatcaatatttgcatgtataacaccgttgtctttgaggatataatgcaacatttggggggaaaatagagataaaccttatcatgctcaagcatgtcttctcaatcaaatatttcaaaataccttgtgactccatgatttcacttatgtctctggtatgctgatgcagaggtgcacatctcagtattagtgcttatacacaacttcaaaaagaaaatctgggacaaagttaagtatgcatcatgagttcaaaaacttatctccttctaatggcagctgcttagagaacttctattttctaattgtagagaaaccatcaaactgccatcaaatattacaggtgctagcagtattacacgaattttgaaaccccggcaaataatacatcccttggtagtctctatccccctaaattgcagtttaaatatatgttagctttgtactgatccaccctatgtgtttatagagaatcaagcatgcatgtttccaagtaaaggaagcaggagatgcaacaagtccaacatgcaggaataaagcatatgaaactcctcgtggactgacaggcagctaggcagaagaaatcatacctatatccttacttttgtccactaaaatgcgatcaatagcacaacaagagggaaatgaacaaagctcccttaattttaaagccattatatcaagcaccaacagaagcagaacatgcgcctttcaatgcaatgatgcaaaccaacatagcttcagcgaaactgagttactttgaccttaagcgcgtccagaatcatcagatcgaaccttccataattcctcatgcacataaacaaaataattccagtcgaatcagccgaactgggctaatcgggagacatttcaccaactccaaccgagtgatcacggagagagaatgacgttgggcaccttgattgacgcggcgacgatggctgtcggcaccggtttcccgtgcgggaaccaacacggcgccggcgggggcaggccgtggtggaatgctgcggcggcggcagcggccgcgggaacaagagatgaggcgcagagcgaggaggcgcgccgcgaggagtagtgcgggggcagagcgattagcgcgtgcggacgggaggagagagcgattagcggattgaggaggcgcgctgcgcataatagcgtgggggcagagcgattagcgcgcggggatgggaggagggagcgattagcgcgcggggacgggctcgcagagtcgtagggacgcgagtgcaggtggtggagcgaggagattagatgagatgcggatgaacggatgagattaaaggtgatgatttgtcttgtaggattggagggatacaactctttctttttatattagtatagatatagatatagatgttttagtgtttttcactaaacccctagtcttgttgtagtatatatttggccatcagaatctctttcagttttcaatataacttctatgtgataccaagtgagacaagacaatcaataggacatagctccagagtaaaaaggccatcccaaaatcagaccatgaaggtagtggcgacgaagaattttgaaatgaacaaattttgaacgaactgaactaaatcatgtgaaatttctagacaattttccattccaaaggagccctgaaatactcctttcagtttttaaatgataaaatttgttaaattttagacatacgatttgacgttatctattaaaagtcttgtcagtcgtagatgggttggaataaatgggctagacccaatttatttttgataaattccattcgcccacaattaatgaggattaataccaccttgaaaaatttaagtggagagatttcaacttaaatagggagctgctgctactctctggacaggaattgaatgggattgaatcaacacaattcaatgccattgaatcaaagtcattacccctataacaaatgagagaatcggcgaggctgttgcgctctctctctcgttttgtaacggacatgaattgaatgggattgaatcaacacaattcagcgccattaccatttgattatcggattgattatgttgtttactttggtaactgatgaggagattcctctccctctcacacactataaaaggccactaccggtaactgatgaggagattcctctccctctcgcacactataaaaggccactaccgggacagatagaagacacacaagtgcggagattcctctccctctcgcacactataaaaggccactatctccctctcgcacactacaaaaggccactaccgggacagacagaagacacacaagtgaggaagattatcggattgattatgttgtttactttggtaactgatgaggagattcctctccctctcgcacactataaaaggccactaccgggacagatagaagacacacaagtgcggagattcctctctgtaacaccttgaaaattcgaccaacaaaatcaaaactctaaaaatacggattttcaaaaactttttaaactaattgcatcatgccgatcttattcgtctattttatctggattagatctcgaagattattaatcgtgagtaaagaatagttaattagaaataaaccttaaaaacaaattggtaaaataaatataaattaaaaataaagattaggtgtggatagtaataaataaaatattatcgcgaccatatttcgatcaattaaatttcattgcgatggaataagaattaaccctaattaaagctcaaataaattatataaaaataaaatatgagtaatattaatctagggtgaattcattagttaagataacacaaatattgagtaaaatgcatatatgtaaaattaggaattgtggaatcaaatttatatggaaaatacactaaaatcgggataaataggaaaagtcactgttcattgcgcctaaggtgttcgatgtggtccctagccttccccctcctctcccacctctgcccctagccgccccgagcccgtccatcgcgccgccgctgccacgccgttgccgcgccgcgcgcccgtcccgtcgcgccgctgtcccgccgccccgcgcgcccacgcacccgtcaccgaccgtcccgtcgccgcgccgcgcgcccgtcgtgtcgccgctgtcgccccgtcccgtagcctcgcgcctcgcgcgccgcctcgcgccccgcgccccgcgcgccgctcgcccatcgcgtcgccgcctcgcgtcccgcgccgctgccgcgccgcgttatcgtcgcgtcgccgtcgccgtcacacctagccgcgccgagccccgcgcgccgccccgagccccgccgcccctcccctctccttctccccctcttccctataaatatccccctcccacattctctccactccatctcccccttcctctcccctctcccctctccactgcgccgccgttcccgtgccgccgcaccgccgttcccgcgccgccgtgccgctcctgtgccaccgtgccgccgcttctgtgccgccgtacgccaccgtcgccaccgccgtcgtcgccgctgccgccgtcggtgagccgccctccttccccctcgcgtccaccgccgccaccgctcgggtaggagggagagccgagagagagagagccgagagaaagagaggaagaagaaaagaaactgagggagggagaagccgaggaagagagaaaggagccgggagggagagaagaaagggaaaaagaaagagaggagagaaagaaaagaaaaggaaaagagagaaaaagagaaaaagaaaagggaaaagagaaagaaaagaaaaggaaaagagagaaaaagagaaaaggaaataaataggaaattagagggagtttggggaagtttagaaaatttaaaataattagaatttaattatagattaattatagtcgtagaattgcaaaatttaatataaattatggattattcttggtaatttctataagaaatcaattcgcggtagtaatttagatgtaattaataactaaacaaatagatgaattcttatagattattatagattatttttgggtaatccctataagtaatcgattcatggtagaaattcggatttaatcgctaggaattttagacgtatattatatttaatcgtttagtcatagactaaattaaattgcataatatttctaggatttcgtccaatatttagctcgtaatagaaatttctaacctattatatacaatactcggggagagtaaattattgacaacgaaataattatacccgcaaaatagtttaaatcgaaattgggtttgccgtagttcgcagatagtgaagttaataaaaaggaatcgattttcgcattcgactttcatttggatttatttggatttttatttgaattctaaccgaattcaaatcaatttttgcacgtaactatagagcccgagggagttgcggatccaagcgaaggccaagacccgcaagactttgagcaaggcaagtcatcactattccttgaacatgttgatcccaattgcgaaattgttttgtttacaaataaaattgcatgcaatgatgaacatcctacttgtgactatgccatgccttgattattgttaaaccttaaatctttgtaaccatgtttacgtatgagtccctagtcaactatgacaattgcttagaaatgctgttctagaatcatgcatactcatttttatcaaatgctatatgcttgggcaattacctttgggaaggtaattgagatgcggcatgtggagacatgagcgccacattgccatgatgttgatgacatgatttgtgaaaggagaaataaaattaaacaattgttttcgactggggcggacggaggatttgggtggtatctggaaaaggctagtaccgtccccggtcaattaaggaccgagccatgaagttaagcatgaaacgacccccgtacaaccgtacttctcgaatgggtatagacctagcggattagatagccgagcggaggcagtatccctgcatagatggttcacccctgagtgaggcaggtgcgctacggtgggacagccgttgaggtagggccgagaggcgtgccctacatcggtgtcgccattggtaggactgccatgagtgtgtgagagagagaacttaacttgaaccataatttaatatgtgtgtgagacttctctttcccgggagcgccagaactcctctcactgctagaaacatggacgcctagagtgcatgaggatttaagttcatggagcgggtactgccaatgcgaggttatcgaaaagctttgccgtgacgcgtctcatgtgttgggacgaggctcatgtgttgggcagtcgtggagtgcgggtaaagtgtacatccactgcagtgtgagtaaaccaaatctattcgaatagccgtgctcgcagttattgagcaccgggacatgtattacacttggctagactctaaattctttaacttgtgtgggatgggatactgcatgatgatttttatgctgatggagccacttcctgagaggcgggaatgtggacgtcctcagaaaaccataacgactcaatggcgggaagctatccttgggatcacaatggatggtggacagaaccgtcattgtttaatatgaacactggtattaaaacttgaacagtctatgctaggtcttaggcttgtgaaaagaattacaaaacttgctttgcgcaaaagaaccatagccatcctttgaatttctctgtcatgtgcatcattgctgtggtggcttgctgagtacggttggtactcacccttacaaatataaaattaatcagaagcaggagatgaagcctcggaggatccctatgcctactaccaggagggagatgaagacgatggcgttcagtaggtcttagtacggtcgttgcctgtggcaatggcatgccgctgcctgaattccgctgccttatctatttctgcttttggatgtattccggaccgctcggtccgatgatttaagactatgcctgcgggcctatgatgtaataattcgtattagacactcgtgtatgtgcacttggtattccagctatgaattcgtgtgtaccaaactacttgatccagggaaatggtactgtttacacgattgattcctgttataaaaatgggggtccacagagctggtatcagagccatacgactgtaggaaaagaccaaaaggcgccccaccccttttctaagttggccaagggagaaattcccatttagtaatactttcaaaaaaataaaaacgctatgtttacaaaactcggtacaattttcatcttactcttaactattttctttacaaaacaagttttactctcaactgacttcgggtttttcttaaaattagatggcagatccggattcacctgctacctgggagttgagcttacctcaatcagaggggtatgtcattgagctgcatcggatgttgaggcgtttgcgatactctgggttcccgtcataccgagtgagacagtgtggctcagtttgggaggctcgggtcgaggttcgcccccgagtcccttccgagttggactacagctttcagacacgtcaccaccgagacctgccagagaccgcgatgcaggatgcagcccgggaggccttcctccgactcagctctatccaccgagctgagttagtgagtaccgagtttgctcatcacccgttccgggaggagggcaactcagtttgcacagttcaggacacgccctgctgctacaacccgatggtgactcggttgtcacgatgggctgaggcagtagatgactactacgaggaggctctgttggagattgacgaccaccagagacgtgtgggggagttagagactgaggtgaccgacctcacagcgcagcagcttcagttggaggaggagcaccaggcttggggcagtgagatagactcactgaaggcacagctccaggtccacggcgatcagttccagcagttatctgaccagtacaacgatcgccgcgggatgatggatactcttgaggagcagctgagagagagtcaggagcacgtcagccagctggaggagcagcttcgagcagccaagatcagcaccacaggggcttctacttccacagcagtaggccgtgaccgctacttcttcctcaccccgccgtacccaccggcgttccacgctcttctaggagaggctagtatgctagctaccgagtcagcaccctacctagtggacccgacagcggcacagccacctgtcccggagttggtgcacactccactgatccctacaccttctccgcagctgggttccagtttggagactccgatccaggtcgactccgagacagaggggaccgacaccgagccagagatcgagccagacatcactgatccttcagaggatgagacccctgttccccgcatcaccttccttggaggtcctcgcaccctcagcactgctcgcaagagcacacgacctccgggcaagaggcccaagccagatccagaggccactacctctgagccgtggggactcaggtttgcgcgtgccagcgaccaccctctacctgccccaggatcctgcggatggctggaggactagactgacggactccttgcagcttcgatctcgtatcagatggtttttggataatatgcgagacacaccccccctcccttacctagattgacgagtagtttgatgattggtttgatgtatcttttggatgaaccttatttggactgcgtatgtatgcagtcgattgcatcatgatttatgtaccatttgtgaaactctgtgatgttatttatgatatctattgttgttgtgttataaatgagtttattccaccatgcttacgaaacaaagttcatatcaacacaactcccttaatgggataaagccataggagctagttagaaaattaggatacttactccatcaacctacacagatggcaagccgacgtcgggcaacaaccagcaatgacgaaactcagacacccgacttaaccactctggccggagttatgaccacccaaacccaacttctgcaagctatcgcgaacaaccaaggcaaccgcggagggtcaagctttggagagtttatgagaaccaagccacccacattcgccacagctgaagaacctatggatgctgaagattggttaaggatcattgagaagaagctaactcttgttcaagtacgtgaagccgataaagtgatctttgcggcaaaccaattggaaggaccaaccggagactggtgggacacgtacaaagaagcccgagaagaagatgctggagaaccaaactgggaggaatttaccacagccttccgtgacaacttcgtgcctgccgcggtgatgaggatgaagaagaatgagttcaggagactacggcaagggaataccacagtacaagagtacctgaaccgtttcactcagctggcgcgctacgcgactagagatcttgccgacgaggaggaaaagatcgacaaattcattgaaggcttgaatgacgagttacgcgggcccatgattggacaagaccacgatagtttccagagtttaatcaataaggtcgttaggttggagaacgaccggaaggtcgtggagcacaatcgtaaaaggaggcttgccatgaaccgctcgcctcagaccgcaccccagcgtcctaaagggacaaccccctcggcatggagaccaacagtggtgacaaccagtcgacctgccgcctctagcaattttcacaagccggttaccattcagaaccgcgctcctgcaccgaatcaggccgccactggatcagtaaggccagggagctgtttcaactgtggagagtatgggcatttcgccaataaatgtcctcatccaaacaagacacccattcggaccggagctaatgcaacggctaatcacgggactgctacccctgctgctggacgaggtctattcaggactccgcagactaacaggaccgctaccggatttggacgcgggcaagtgaagcacgttcgagctgaagaggcccaggaagaccaaggcgtactgatgggtatgttttcactcaactccactccagttaaagttctcttcgattcaggagcatcgcattcatttatatctttgaaagcaagtcaacaacacaatttaatcagagttaaactaagacaaccaatgttagtacattcacctgggggtgagatagcagtggatacagcttgcattgacgtacccatccgccttagggatgtggtatttccctccaatcttatggtgctaataccccaaactcttgatgtcattttgggtatggattggttagcaaagcatagaggagtaattgactgtagacgtagagaagttaccctgaccacaccctggggatcggatatgagagcaaccatggatcaagatcctaggctaaccgaacatgccggaggtatatttaccatgctacccctaaagggaatgcccgtagtgcagcgatttcctgatgtgttcccagaagatttacctggaatgccaccagatcgtgacatagagttcattattgacctgatacccggaactgcccccatatccaagagaccatatcggatgccggtcaatgagttagaagaaattaaaaagcaaattagggagttgcaagagaagggatttgtacgccccagttcgtcaccttggggagccccagtgttatttgttaaaaagaaagacggtagcatgagaatgtgtgtagactaccgatcactgaacgaagtaactattaaaaacaagtatccactaccaaggattgatgatctcttcgaccaacttaagggagctaaggtgttttcaaagatagaccttcgatcaggataccaccaactgaagattaggaccgaggatatccccaaaaccgcgttttcaacacgctatgggttgtatgaattcacagtaatgtcgtttggtctaaccaatgccccagcatacttcatgaatcttatgaacaaagtattcatggattacttggataagtttgtggtggtattcatcgatgacattctgatctactccaaagatgaggaagaacatacggaacacttacgattggttctccagagactccgaaagcacaagttatacgcaaaattcagcaagtgcgaattttggttgaaggaagtcgcttttctgggtcacgtaatctcagccggtggagtagcagtggaccctgctaaagtggaggctgtcacggaatggaaagcacccaaatctgtgactgaaattcggagttttctaggcttggctggatactaccgacggttcattgaagggttctctaagatagcccgaccaatgacacaactactcaagaaggaaaagaagtttgtatggtcagaacagtgtcaggagagctttgagcagctcaaagaaaagctgacctcggcgcctattttagttcttcccgacatcaggaaagacttcgttatatattgtgatgcgtcaaggcaaggactaggaggagtactgatgcaggacggaaaagttgtggcctatgcgtcgtgacaattgcgaccacatgaggaaaactaccctacccatgacctagaactcgcagctgtggttcatgcgctaaagatttggagacattatctgattggaaaccattgcgatatctacactgaccacaagagtctgaagtatatcttcacccagtcagatctcaacttgaggcaaaggcgatggttagaattaatcaaggactatgatctagaggttcactatcacccaggcaaagcaaacgttgtggccgacgctctgagtcgtaagagccattgcaatcatctgagaatggaagggatggtccctgagcttagggaggaaatagctcagctgaacctacatatagtgcctcatggacagataaacaccctggacattcaacctcttttgagaacccaaatagaagaagcccagaaggacaacgaggaaatccgagaggtgaaggaacgcttagctgcaggacgcgcaaaggaattttcaaccgacgaaaaagatgttctatggtataaaaagagaatttacgtacccgaacagggtggactgcgaggattaatcctaaaggaggctcacgaatcggcatactcattacaccccggaagtaccaaaatgtaccaggatttgaaggagggctactggtggcccaacatgaagagagatgtggccgaatacgtagcactctgcgacgtatgccagaaggtgaaggctgaacaccagaggccggcaggtttgttgcaacctctcaggattcccgaatggaaatgggatgagataggtatggattttattgttggattgcccaaaatcgcaacaggatatgattccatttgggtgatcgtggatcgactcaccaagacggcgagattcattcccgttaagacaaattatagcagtgctaagctagccgagttatacatgaccaggatagtatgtcttcatggtgtacctatgaaaattatatctgatcggggcacacagtttacctcacatttctgggagaaagtccatgaagccctaggaagttacctcgcatttagcacagcttatcatccacagacagatggccagacggagagaaccaaccaggtcctggaggacatgctgagggcttgtgctctggattttagcaaggactgggagagatgtttgccttacgccgaattctcctacaacaacagctttcaagcaagcctaaagatgtcactcaatgagtcattgtttggtcgacgatgtcgaaccccactaatgtggtccgagactggagaacgggcggtacttggacctgacattattcaagaagccgaagaaaaggttcgcttgatccgcgaccgtctaaaagtagcacaatcacgacaaaagagttacgccgacacccgaagaagaaacctggaatttaaggagggagattacgtttatctaaaggtttctccgatgaggggaacaaaaaggtttaaggtcaaaggaaaactggcaccatgatatgtgggaccattccagatcatcgccaggcgaggagaagttgcatatcagttacagttaccagagaatatcgcggatgtacacccagtcttccatgtgtctcagctaaagaaatgtttacgagtgccagaagagcaagctccgctggaagagattcacattagcaatgatctcacatatccagaacacccgatccggatattggatgaagccgaaaagaggactaggagcaaagtgtggcgtatgtacaaggtacaatggagcaatcacactgaggatgaagccacctgggaaagtgaagaatttttgaggacggaatacccgcacctattcgaagactggtaagaaatctcgggacgagatttatttaagggggggtaggtttgtaacaccctgaaaattcgaccaacaaaatcaaaactctaaaaatacggattttcaaaaactttttaaactaattgcatcatgccgatcttattcgtctattttatctggattagatctcgaagattattaatcgtgagtaaagaatagttaattagaaataaaccttaaaaacaaattggtaaaataaatataaattaaaaataaagattaggtgtggatagtaataaataaaatattatcgcgaccatatttggatcaattaaatttcattgcgatggaataagaatcaaccctaattaaagctcaaataaattatataaaaataaaatatgagtaatattaatctagggtgaattcattagttaagataacacaaatattgagtaaaatgcatatatgtaaaattaggaattgtggaatcaaatttatatggaaaatacactaaaatcgggataaataggaaaagtcactgttcattgcgcctaaggtgttcgatgtggtccctagccttccccctcctctcccacctctgcccctagccgccccgagcccgtccatcgcgccgccgctgccacgccgtcgccgcgccgcgcgcccgtcccgtcgcgccgctgtcccgccgccccgcgcgcccacgcgcccgtcaccgaccgtcccgtcgccgcgccgcgcgcccgtcgtgtcgccgctgccgccccgtcccgtagcctcgcgccccgcaccccgcgcgccgctcgcccatcgcgtcgccgcctcgcgtcccgcgccgctaccgcgccgcgttatcgtcgcgtcgccgtcgccgtcacacctagccgcgccgagccccgcgcgccgccccgagccccgccgcccctcccctctccttctccccctcttccctataaatatccccctcccccattctctccactccatctcccccttcctctcccctctcccctctccactgcgccgccgttcccgtgccgctgcgccgccgttcccgtgccgccgcaccgccgttcccgcgccgccgtgtcgtcgctcctgtgccaccgtgccgccgcttctgtgccgccgtacaccaccgtcgccaccgccgtcgtcgccgctgccgccgtcggtgagccgccctccttccccctcgcgtccaccgccgccaccgctcgggtaggagggagagccgagagagagagagagccgagagaaagagaggaagaagaaaagaaaccgagggagggagaagccgaggaagagagaaaggagccgggagggagagaagaaagggaaaaagaaagagaggagagaaagaaaagaaaaggaaaagagagaaaaagagaaaaagaaaagggaaaagagaaagaaaagaaaaggaaaagagagaaaaagagaaaaggaaataaataggaaattagagggagtttggggaagtttagaaaatttaaaataattagaatttaattatagattaattatagtcgtacaattgcaaaatttaatataaattatggattattcttggtaatttctataagaaatcaattcgtggtagtaatttagatgtaattaataactaaacaaatagatgaattcttatagattattatagattatttttgggtaatccctataagtaatcgattcacggtagaaattcggatttaatcgctaggaattttagacgtatattatatttaatcgtttagtcatagactaaattaaattgcataatatttctaggatttcgtccaatatttagctcgtaatagaaatttctaacctattatatacaatactcggggagagtaaattattgacaacgaaataattatacccgcaaaatagtttaaatcgaaattgggtttgccgtagttcgcagatagtgaagttaataagaaagaactaaacctacttgatcggctgtagatactaacaatatataatccttatgtcgatatatacttaaatcaagtaattgggatagatcggttgccatgccgaaacagtataaatcacttagatcgaaatatatattaacaacaagactatatatgttcatagcatagccgatcagatccagcatgtatcggctaatactccgatactactctatattaagatatcaaagcaagtagaatataccaaacaaaagcctaatatacttaaatgcaacaagatcttaacataaagggcggctttaacatatcaatcaagcatataagataaatgtagttaaattaggtaagatcggctgaaaccccaatgctaccctaatcggcaaccaaagacaggctagagattgagattctaatcacgactcataagatcaaactcaactgatgcagctataagtatgaaaagaaggacagtatctagacaatcaagccgttggatgtttcatagagtggtagatatcttatataatctaagtcaacgtcggtatttaacctaatcagctgccttctagtaacacacgttagccgattgaaggttaaatagcgatattgccggagattatgtaagatatatgataacttgacgaattacataaaaaatattagagtatcataaagatggaagcactaaacccgagaacgcaagccgccataaaaagttttacctcttgttgaagattgaaaccgatgcagctcaacccgaaagcaagaactcgtcgaaacaaaacgaaagtaaaagggtggcaatgcgccgagattgtattgaacgtgagttgtttgattacatagggctcgaggtctatttatacccgagattacaaaatatgtccatatcggacacgactcttatctctaacaaactctaagatactataagtctttgcggcagacttttgcccaaacatatctctaaggaaattacatgaaatatcctaattaatagatacaattgccttcttaggactctatccatgcgtggcaatctttatgaagtacatcaacccaacccaacaatgtatgccatgtcatattgtcggattcggctcaatcggctaaccctgtccaactcagactctgctgatcttgatcgcagccgattcggactccagtcggtccttactctgtttccggaatgatttccatctcgaactccgtttcgattccttcttcatctccgatacttggattaccaaatttggtcgttaacacctttccatcgcctcctcctctgtgagctcaatgtaaagtgagctcgacgacctccgcctctccattatctctccctccacttctctgtccttactaacaacctcctcccctttgggtcctctccctctgtctccttaatggtcgtcctcgtcggccaaaccaagctcacgaagcggtaaaatatggcctcctcctcttctttcgttccttctcttttactttcttctctccctctttctctccctgtcctcttcattccgtggacagtagtcgagggcgatggtggagtaaccaagctcgaggtcacgggcagtggcgagatggagtcggagtcgaggctgtgttcatatggagacaggcgtgatgggctaaggcgacgtgcgacggactcaccaaccatatggcatgccaaggggcgacgagcacctcgagcttcctagttggttttgtgaaatagaggggctttagcagtggcgggaaatagagagggtcatgccatctccactgcctcacggtctccaattgattctggtctcgagaccccgatcgagctctgtcctgccgccgccacacgctcccttgttgtcctcccgcgaagaggaatccggggagagagaaagggtaaagggaaaagaagtggctgacatgtggacctgttatttttaatttttttctcactgaaaatatgggtcccattttgttttttattcttattttattgccgcgcaagcaacacgttgacgccacgtggcataaagactaagtcaacacatcacgaggatgccacataggacaaaaccacccgaccaaccaccgagggactcaaattttactggttttggtagttgaaggatgtaatatatctagttttgctgttgaggtatctattagccgagggcaatagtcgatggaggcagaatagacttactccatctcaaagctaacacaacagcgtgtgctctacgaaagcatatgggcccatcaccatattagccgctaagcccactaaattcagtcattcacacattcacccctcctacatttatttctcatatcacacccctgaggaaggtcgccattgcgaacagactgcaattcacaatctcctcaagggtattattgcacaagtaccgaatagattagcactgtgtataaagctctacggccgccgcgaactgccgggcgctagggtttcgggttcctcgacctctcgccgccgtcgtcccgcgcgcttggaggtcggcctgctcgacggttgtcgccatggtacgcatctgagcccaaaatcaatgtgtcccgtcggttcaattcgttggtgaatactggcgctgatgttgtggtgtttttttttttctgttagatcatccccaagaagaaccggaatgagatctgcaagtacctcttccaaggttggctcactctgctctccttgattggtttcgatctcattacaaaatggattgcgtaaacaggaaattgggtgattgttttaatccctcgtttaattggaagtttggagtgattgaatagctgctgaatgtatacgaagcgaaagaaatcctaatttgtgcatgtgcttatgtaattctccgtttttttggtttgaagagccaagcgaccaatcaattttaagtttctctaacaaaatataatagaaatgtcaaatactggactgatttatcgatgcaacatgcaagtctgtgctgcattattccacaatcagtaaaggggtacagaaatttcagctttcacctcttggtaacatttccagaatagaaaaatgcttctacataataagaccatatgtcttcatcctatttcgactgatgaactagaaggatattgtttctcatttcttcatttgtttgtgtgcattgtggtgcatcatagagggggttttgtacgccaagaaggactacaatttggcaaaacacccacagattgatgtgccaaaccttcaggtcatcaagctcatgcagagcttcaagtccaaggagtatgtcagggagaccttctcctggcagtactactactggtacctcactaatgatggcattgagcacctgaggaattaccttaacttgccgtctgagattgtacctgctacactcaagaagtctgcaaggccaccaggccgcccatttggctctggcccccctggtgatcgcccaaggtcctaattttcttctctcttcaatctttctggggtttcaagtgtaacttacatttaataacttacttgctaatttgaaggttattttatcgcggtttactttggggagcatgagtgaatttagtgttgataactaactcttgttttcagaaacttaggaattgtatatctttgagctctaagcacgtttggtttgtatgcaaatgtgatgacgtttgcattaataatcatgtatttgcattcatatagtggctgaaacaagatgttaaacacacaagtaatacatggtacatttttaactgaaagtagatctatctctatgtgctgtattttaattttaaaagggaaggaaaggtgggttgatgccttgtacttctaacttaataagatccatttttctcatagttcattgtagtcacattgcaactgtaaaaaatgtggatgcaattgtgttcagaactcaaactgaggcatatctgcatgttctgttgaattcttgagctactgtggcaatattttctagttgtcgtttggctgatttctgattcctgtgatgtgtttaggggcccacctcggttcgaaggggacagaccaaggtttggagaccgggatggctaccgtggtggacctcgtggtgcgcctggtgattttggtggtgagaagggtggtgctcctgcagaattccagccatcattcagggtaatcaatcaattctgcctattattagtgtttcactatgtgaggagataaacatgattattgaatagcaactcgccatcctacataagctaattggaaaagggcataacaactgattttgttgtttaaaattaaactatattacaacattcggatgttccgttcctgctcttactttttttctaacacttgcacttttctttgtttggttttggtgcatatgattaataactggaggatgtttttatttgttcttatttgtattatttatttccaatcttctcatttctcaatgatggtacaccacaccatgatttcactcaaatgatgtttcttgtcctgaaatgtttagagttctggtggtagacctggctttggacgcggtggcggcggtggtttcggtgctggtccaacctcttcctccatggagtgaaaggagctcaggattcttgtcgcaggagacattttagtattcaagttttgcagtggtgtttgcagtagagatcaatgcgtagcacctatgttgaaaccttaagagatgcaagtgtaattctcctggtgttgatggcttgagagtttatcccaaaccctctgtagaagccaatgccaatggaaatatcgttcagctactcagcaatcaagtttttcctccccaatttctacctgtcaaatttcttgatttttgatgtattagtctgcttttttccattgtgaggcataacatacgtgctgcatgtttctttaggcgaaatgcacaaaaagtgaaataaaacacgttaaatctcaactactgtacagtttacaacgtatctgaactgctaatatcctcggtttttcaggaacgaattactgacatagcataatgcatccctgcattacaaaaccattccgtgtctgtctactacgactccaaattaaatttcatgaaatttcaaagaatggcaaaaggattggaatttggaaggtttattctctctttatatctctaaaaaaacggattggagcgcgcactagatggcttttaattcaattgatatcaaaacaataaaaacgatgactgtttaatatagaaattaaaaggaaaggacggataaaaaaaccgaatccttatgtatgcgcacacccttacgtatgaaaagaaaaaaacaactttagcggcaaaatagcggtggaagaaaatcggaaaaaatagtgaaaaaaacgacggacaaaaaatacccgaaaactttatgtattttttattagatatataggtgtagatatagatttacaaaaattgtcaaaccacatgaaaatcacaaaaattatataacgtatataatttttttaggttaattacttctattggtcaactcaatatgcagctataaaaggttactatttgtacatcggatcagtcttgaaaaaataaaagttccaaggtcctggacatcaatgtgtgagtactaatctggggacatttttaacaatattttgtatttactgaagtatgggataaaatatactattaggggtgaaaatgaaaaactactaggaattagatgccacgtgcaggttcgcatgtgggccttgaggcgagaattgtgtggttggctgtctccaacttggagatcattatcctctcactctctcgttctctctcctaggttcccagccggcgttgctgctctccctctctgcaaggcagcgtgtggcagccggctggagagtagcagggctcgttggccggtgggagtagagtggctgctcttctctccctcccagatctccaccccctcggctccggctcactcgcctctggccgacgaggagggccacgggcggagcgaagcgaagcggcggacgggcgagcgaggcgggtgggcggggagcaaaccaacggcgacctctttccctcccgcatgcatcccgttgtctctccgctgccctcttgcgtggatctgccaccggcgcctggatcccatcctctccgccctcccctcgcgcggatccgccattggcgttgacgggaggggtggatccggtgacctcttctcctcccgcatggatcccgtcatctccccgctccctgctcgcgcggatccgccgctagcgacaacaggaggggcggacccagcagcctctcctacggtgactacaacgattggtggacgtgggctgacccagttcccggcatctgctgcggcggcgacagcgaagttgccgaggatggcatcacgtgcgacttcctgctcaagctgctccgggcggggagcatggtgggtgccgacgcggctctgctgcaggagctggaatccagggcggtgcatacctcgcctagtcagctctcgaggccgggctgcggccgactgacttcgaggagatctcgcccgcgccgtgcttgccaacgaccgacgtccttgactcgccgtcagttccagccataaccgcctaggtactttattttttttaagacaatacatcatgttgttcatgtgaaatcttgggatcatgttgcatagtagtaatcctgttgcttagaatacagttcttatctcagcttgtgttttcaaatgtgaagttgcggggcaccagttctgtgatcataatcaataatcatcacatatctgtaacacaaacacatatcaccagttttgttttgatttgtgtttttgatgggaacagcatggaagcacaccagataagcacatggattttgttgggctactgtgttgtaacacaagtttgccaaacatttatgtggcatcaacatctatcttggaagttgaagctgtagataaacattatcaacaacaaaagcaggatgtatcttctcgaaaacaacggtaagaagcaaattattatgtctcttttgtagctctactacttatggaatattgagatgaatataaatctaggcggtacttgtgacattcgccgcacagcggtactgccgccatctagttgtattttaattacttgctacagtggtttttagagcatgattaacattatggtggagcatgattaaaaattgcaataattaaacaatggttcagctgtctgcacagttaatgcttttctgcataaaatttttgttgctgcaattaccagtacttttaagttttctttcttctagttatataaagccacctaaaaagagattttcatatttgggtttgcaactcagagattttgtggtctcataaggagtcgtgataatagccactgaacaactaaaaaatatgcctgttgctaacttgctttgtgttctgcatcaacaggaaaaagatttggatacatattggtatgagcagacagacctcaatccctgcactgcacaactgcattgctcttcgcaggtgaaacgaatctagacattaccactatatgttaattaattagatggtacttttagttcattcataaactaccttacaagtcttgattaatggaagtgtttatgttagtaattattcaagctccttgggtagaatctaatgaaattgaaattgcatacaaggttgagttcattgataacctgaaatcgacattgattggaggtgccttgacgtcctagaggaagagccttacgatttatattttcttgtattttggcctgagaaaaaaatctgtacaatcatgttagtgggagtgctagctaaaaatagtggaaagaaaagcgggatagaatctgactcgagatagaatatgactcctgaaagctggagtaggaaacagtgtgggggaaccagcctgactcgacgaaagaaaagcgggatataatctgactcggggtagaatctgactcctgacgtgggctgggcaaattccctgacgtgggtatattcctgtgttctattttgaacctgatttgtgcgtgaacctgaacctagactcctgtgttattttttgttttttatttgttcctggactcctgtgtttttgaacctgatttgtatgtgaacctgaacctggacttctgtgttttttttgtttttgtatttgttcctgaactcatgtatttttgcatgggcttgtgggcttgtagatggacctagaatcttttttttttggatgaaggagtaggggcttctagatggacctgaaatcctggaatctgttttgggcttgtggtgcattaatctaaccagaatcgaaccagaatcggaaagtagcgcatcggatgaaaattagcgcataatgacggacgaaaacgtgtgattacagagatgtgacgacagaaaaaatactaatatttatattagttaagattaagatatgtgggccatgtgcccacttcgatattaaatttatttttttgggggaaggctcaccgccactggggccctcgcgcgtcgcccaggcattgcactgctgcctgggcctggcgcaccccaaccaaacccagttctaagatttgtttaatccattggtcttgggccgtttgcacttcatcccgtgttaccttggatcatgatcgttggatgggctgcacattccaagcttaacagttcagttttggaaaaagtccaatttgactcccttaattgtacgccgaatctaattcataccccttaaccagaaaaccggatagaacgactccccatttgactccctcggcggttttgctgacgtggcagtgttgacctggacttcgtcccacgtggcgctgacatggttttagaattgaaaaaaaataatcagtgggacccatctgttattcacacaaaatatattgtgggacccactagcatgtggggcccacatgtcatccttcttcccttcttcctctctctcccttctctcttttctctccccccctccggacgcacgcggggatcgatggcggcggcaagcggggccggagtggtgacggcggcgtacgtgcggggctagagacagatcggtggcgtacgggaggcgggcgctggagcgtccaccaccccctccagctccacctcgccatatccatgttgtcatcgtcgtccgcgtccccttccccccttccgctgcgctgcctctcccttctcccttctcggacactagcggcgcttcggcaagcgatggcggaggtagaggagtagcttgaaggcgtggaggacgctcccgagctcggcggcggagggtgggcgagatcttcgtagcgctgcctctctcctttcccttctccaccaccggtgatagcctcagaaggcggcggcgcttcggttagcggcgatgcaggtagaggagtatcacaacggcgcggagggcgcccacgagctcggcggcgttgcgctccaccgacgctgcctcccatgaccgcgccatctcccccaacgtctctacgctcctccgcctcgactactttgccgccactgccgaggccaagctccccgtgctcgtctggcgacgccgtcgtgggtgtggttccagcaacaacgccgactggatcccccgcctcctgcccgccgccgccgctttggtcctcgcccgcatgccgccgtcgcctccgctgtggtcctcacccacatgccgttgtcgccgccgctctggtccttgcccgcatgccgccgtcgccaccgctgtggccctcgcccgcatgccgccgtcgccgtcgccactctgaccaagagagggggagagaaagagagagggggagagagaaggaaggaggaaaagagagaggatgacatgtggaccccacatgtcagttggtcccacattattttttgtgaatgacagatgggtcccactgattttttttcaattctaatgccacgtcagcaaaaccgctctccaaaaccgctgagggagtcaaattgcactggtttcattagttcggggatttgtcctatccggttttctggttatggggtacgaattagattcggcgtacaattaagggagtcaaattggactttttccttcagttttcactgttatcttggaaaatcattaacgggccgatgaacgggctacacagttaggactgtaggagcccattcagtacactgagctgcagtagcatgggtatttatggattttcttttgccatgttctctcattttggaaaaaaaaaagtccattttgcgtcgtctaaccgggtataaaagctgctcaaatataaatggcacttctaacatacccatggagtattgactatcctgatttactgttttaactttgagtaccactgatttttatatgattaaaatgcgatgagcaaaatgttactagtactctcttgttatacgatgatacaatgcacttcgataatatgacattttatattatttataatctattatcaaaactaagtggccaaagtttaaggattaatagtatataatgtttagattataaaatagaggcatttaaaatatgatctagattcctctgatctattagtgtttgtacaccattctattcttggtcacttatttttattagagaaaaataagattagttttttattttcagaaaaaataaggttttttacagagaagaataacgtggatcgagcagaaatataagaggttatcacattataacaacaaatgaattgtacataatatattatagtatcaaaaccatgctagataccacaatcgctccaaaggtgtagaaattatcacattaaccattgaaggaagaagggtttattttttaacatcgtgatctagattatgatggtgtaaattaatcggtgtagctttataagaaagacaattatgtttttattattagaagcacatgtcatattttcatttatcctttattctagctctgctaaattgtatgggaaatgcggattgtcctcaacaattagcatttgatttgtatgatataagattctgaagtggtttagtaaccgtccccaaaataagtacggatgtttttctttgatttcaagcaccttgatactatgaggatatattatgtttttctttgatttcaagcaccttgatactaaactacaccttttaagtttcaaaacattcagaaggtgctcaagcttctagtagggagcaaccaagtaataataacctaaaccaggactagtaccaatcacaaccaatataggcatgctgaaggtttctcacaatgttgaaaatgttcatagtgttaagtactaaaaattaggaaagttccatgatgaatatatgcaaattgtaaaatgtcattacatgtgagaatgatatgaaccttggtttccacattaatgacacaaaacatgatatgcaaaaaaatggactttacttcttgtacagggtaaagtccattttttcccttagactttgctcaaagtccaattttcaccctgacctacaaaaccgaatgttttccgctccccaagtttcaaaattaggttaaacccctgaagcatatgttgttctggttttgtttgaagtggttgtggttttcctagttcaaacccttatcatgcacgtcttgttgattcacatgtcacgattaattaggctcacaaccataaaacttaattactaagttgactctcatgctagcgaaaaccttttcatatagacctatagatggccataaggcctgaggcccgacggcccggcccatggcgcgacattttggcccggcccaaacacggcacgacctgatggggtcaggcccgtgccggcctatcccgactgcctggccgtgcctgcccccccccccccccactggcacgaccgagctggcacggcacgatgggccggcaggccaggctcgacacataaagaatatggagtaaaaatagatatattatatgccacggtccaaagaatagggaagtaaaatagacttatttcggctatatatatgttagcccaaagaggagggagagaaactagacttattttagctatatatatgtcacagcccaaagaggagggagggaaaatagacttatttttaaaaaggcacgatgggacactcgtgccttcgagctggcatggcacggcccgactgctggtgggacgtgcctgggccgaaggtgcagcccatgggatggcacggcacaacctggtgtgttggtcgggccgtgccggcccgacagattttagcccgagcacggccgtgcctgggccatgctgggccaggccgcctgtttggccatctatatatagaccaaaaccaccatggaatatgttttaaggtgttatgtttggttttcaaacctgggggttgaataataaccacttttccagtttagggtgaaattaattgaacttcaagaatagttcaatggccaaaattggacattaccttttttttagagtacaaacattcagatggtgttcaagctcctaatatagaccagctaaattaggatacccctaaaatcggggctgttgccaatcatcacaccttgagtgacgctaaagttttgcttaaaaagtgctaattatattgttgtaatatacaattctttttatttagaatattatcattaaagttctcaatcaactagtgtattgttcctttggcttagttttaataagaaattaacatgtgtttgcattttcagaaaaaggaaataataagtgagtgttgctaaagtgcttcttgcatccaatgagaaatctactatagaagatggttaatgtggtacacccaatgagcattcttcctgagaaaacaatgcatttggcacatccggtgaactatgtgctgaggaagaagtatttgacacatctggtgagcaacattcagaacaaaaaaatgacacatttgatggatgacttctagggaaaacaaggtagttgacaaacttaatggtaaacttgttggacataaacatggaatatccaaaagactgaattgtgtttagggccacttttttaccaaagtttcacttcggaagtgcttccaatctacttacttatgattgttggtagttgtatttgttcatcgccattccgcattaatgtaaatattacaatgtaattgtgccaatacgagtattgttatgtattggttaatcttaccagccacctttatggtaaattaatcgagataatagaacttggtttcctcgtgtcacaaatattgtattagcaaaggtagtttatcttgcacataaaataataataatatatatactacctaataagtgcactccattttgttcacttaaacatatattcattaaatatcataaagtaatgtaactattgggttggtccattggtttgtagacacacatacactccgaggccgattgaattcatgtgtaccgtaagcaatgcatgtttatgaacaacatgtctataaatcttagagcaatatgatcaaattgtggcttgccagaatcttgcttttaagactctcttcgttccaaaaaaaaaatagcgagttagtattggatgagacataccctagtaataatatgaatctagagagctggcttgtgcaattggtgcaattgttgtgcccgtgagtactcgagagtaaaaaaacatgaggcacgtatacagattcaggattcccgaaggataataaccatacttatgttcttggtcactgtatggaaggtttgtacaaagggtgtgaagctctcgagctagctaacaaacctaaagttcttgctgattctatcgtccaaccctctctctaccaagaaaagaagagctctgtatgcaataatacagctgaactaactcttcgagctccatgcggtttgttgtagtggcagacatcctgtgggacgcaatgcaaggccctttcgcacagtcccagtcttttcccacaacctatgtatccacgcctatgtgaaaacttgactttagattcaacatatctcgcttcattaatacattgagtaatgtaatggaatctgaacttaatgcgatggacgtgctctgtagccattacgacatgtaatggtatccaataggatacacgtccacctatcttctgtcagcgagaacaccacatacccctccttgggctgttggcgggttcttgtttgaagaatcctggagtgcacgatttaatccgttcccgaatgcagctacgtgttgcatctcgtgaaggatgactgttcctgcctactcttattaaccagttttaatcacatacctagtagtcctcggacaacctctagaatcatgttcccatcttgaaatggcgccatgactcggttctcaggcggctagccaattggtcccatgcaacaacgcaaatgatgcatggccaccttcgagcagctctaagggcacggccttgaattgggtccgctgacccaaatagagtgcatcctctctttaaagcgtactactagatggatgataggtacgtggacctccccgctagatcttagatctagtttaagcttaggaagcgctggccaacaacgtacttagccttgacagcctgtctttcaacctacgctgacaattctatgaaaatacactagtttgaaggaaaaggatgcactgaactctagattttttgcccttttactcgccggaagttgatggttaggatttcggatggcttttaacaaccaccaacaaatggcgagggccaatagtggcagcgacattttgatctcagggcgcggaggcctaggatcatcgtgatggtgcagatcctggcggtggcatcgccggcctcattggctaggacctgggttcaaaatttcggatcgaaatttctgaaattttgaaaatttcagttctatcggaccccccctaatatgatataatttcggccgaaattttaatttttttttttaattttttttcgtgaatttggtaatattttgttcaaatttggtcaaattttattaaaaattttataaaatttcggccacccctcatacaaatcagcaaaccaaaacattaaacccttgctaggacacagagttcaccgctacacatgatgccttcttcagtatgatgccccgcataaggccttgcttgatctgacggttgggatattctctgggtgggatcgaacggaacaaactcgagagcaagaaaaaggcttacgctgagcaaattaagacgagagctagaaaaaggcttacgctgagcaaattaagacgagagctagacacacacacaaatgttcgcatgatacgttgccttgccccggttgctggatggcttttgtggcgcccaaagcaaagtacttgttcgatgcctggctgtggatcagaggtagtacaaccttccgatgcagctgggttttattcttagctgagacagtagtcgatcgaaataaagctctacagctgcaaggtttccttttctttttcagcctaagaacctctcttattttcttcattattcaacattttatatttaaataggaactagatataaagcatttgaccgtttttttaaaaaactttcaaatataactaaagttataactaaagtataattacactataacttgtactatataatataacttgtatacacatgaagggtggcatgttgtctagcagcaaatgcggtgatacaccaagttgacagtttaactccttgttcatgctcttgcatgtgatttcctaccctgcacgaatcttgaggcacaatccaacggtcatagattcaaaagtttggggagaaaaaaaaactcggacgtattcaagcaattccatttaactaacttttacttttaagtctagcccgtgttaagagaagtttaatagtatagcccactactaattccaattcatctatagagccaattcatacaatagttgtttaatatactatcaatatatggtcttacctatcatacacacactgcgtcttggatccgtgctgcagctagctataggtctgtagcccgctactcttatctctcatattttatcttattaaaatatgtttatagctggctcctcgagaaacttgacatatttctaaatggaattttgttttttttaagaacagagagtacataaataaaatttgactgtgattgtatatagaaaactgaaactagtcacaaggaggaaaaaagaagaagaagagggctataaaagtaataaagagcaaataaggagaagattatttagctgtagagatcaaccgaagagagcaaagtatcagtcccctccgagagagagggtttagaatagtttcctcgtcaaacaatccgcgccgtcgtctatataaaaacctcacccttctcgttacatcttatctcatcgtgtgttaatttgcatttgcactgcaaacggcggccggccatggacgggcccagcggcgcaaccgacacggccaacgcggccggcggcgacgcaacgctggctgttcctccgccaccgccgctgctgaccggaacggccgttccgccgcccccgccggcagctgcccagccgcaaccacagcaagcaacggtggcggagggtgacccgccgccgccagcaaccggtagtgcagaggaggtggccggcaacggcgagcctcctcaaccgcccgccactgatccggcgagcgaacccactgcgccgccggaaccacagcgagcaacagaggagaagaagggtgacgagccaccaccaccggcatcaaccggagtgaaagaggaggtggccggccatggccagcctcttccaccgcccaccagtactccggcgagcgagccccctgcgccgccggaaccaaaacagcagcagcagcagcagcaagcaggcgacgcggcgaagcaggcggcgccgtctgccgacgacgaggacggaggtaaaaagaggcacagccgttggaacttcctccgcaacctcttccgccgccacaagggctcactgcgcgacgccgtgaaggccgccgctctcacgaagccgcggaaggaggaggaggagaagagcaagaagaccgccgggcccgatgaagccagcaagctgccgccgccgccggctccacctcccgctcccgacgatgacgcggctagccgtagccggtctacgcggaggaggctcgtgaaagtgctacgggccgtccaattcatcacgcggttgaagaactggaggaatcgcccaccggaggacggtaaagccaaagaggagcagaagccgtctccggagacgaaggacaaaaagccaccggagacgacggggaaggacaaaaagccggcggacccggagctggggcaagcgaaggagaagacgccggcgccgcagcaagaggaggagaagaaggagaaggaggaggagacgccagaggcgaaagcgcagcggctagaggaggagaagtcacggcggaggtggaaggaacgcggggaggcgctcctgcaggagatcctcgaggccgccttcgaagcgctgctcgccggcgagttcaacaagctcaaggatcagtggcggcagtgcctcctcaccttctccttcttccccgtcaaccacaaggtgaagaagcaggcggtcacctactggtgggccgcccagttcggcctcccgcaccgccgcgcccccagcgcggcggagccccgcgggtcggaggagatcttcgccgagttctgcgccagcggcttcctcgagccgatcaccagccgctgcagcggcgcgtcccacggctgccgcgtgaacccgctcgtccactggatggtgaagcggacggcgaggggcgaattcgccggcctggaccagcacggccaccccaccgtcgatccgggcgagtccagggtcctctgcctcacggcgagccaccgcgagcttctacagaggctaggcagggccgacgagtcgccgtcggcgccaccgtccccgacgagaaaactttcgaaagtcaaaacgcccagccaacaagaccgtcagcaaaaagaggcaaaagaagaccgtcagcaaaaggagccaaatccaacaggaacgccctccaaaatagccgtcagcaaacttgagggcgagacgacagtacgtatagactcctcccctctcattttcaaattgggtgtggattattaccgatttacacttttcaactttgactcatcagcaaaagaagccaaacccaacaggaacgccttccgaaatggccgtcagcagacttgagggtgagacgaaggtacgtatagaatcccatctcattttcaaattgggtgtggattattaccgaattactattttcaactttgactcgtcagcaaaagaagccaaacccaataggaatgccttccaaaatggccgtcagcaaatttgagggcgagatgaaggtacgtttagactcccctctcattttcaaattgggtgtggattattaccgatttactgttttcaactttgttgttattaatagttttatatggttagggtatggtttacaatataacatatttatatggtgcaacatattttaaatagtatgactttttttttgcggggcaatagtttgccatatttgatagtattaatagaaaggggttgtgaaaaattgagtgaatttgtgtatttcataccttggtgcccgggcaccgtggtatatatatatcctacattgcgaaatctactgccaagggttacttgtcgttctagttttatcttaaatcaaacatgtatatctttcaccattgattttaaaaacccgtgtaatttaatggcatgtgaattatatattatgaaattatttctcatgatgaatctaaaattacaaatcttagaaatcaaactatatgagtatagaaaattatggtcaaatattataatgtttgacttaggacagactaaaacaactagtaatttaaaacgaatggtgcattttcaattaataaggggcagttggtctttttagccctatcttaattttcattctagtgagttttttttaaaaaataataatttgcattctagtggctaaaattggagttattttggtattgaggcagtaacaaagttcttttctaccatgtgcataatttagggaagcattaccacaatatggaaaagaaatgtaaatttctaatagtgtggctcaaatacaaataaaaatattccatctaatagaaaacccctattaattagtttcacactatttacctggtgctagtacacatgctatagaattaaaagcactttggcctttatttgaaattatgaaactagaaaactcataagtacctaaaattttgcctaaaaatgtataatgaaggaaaaataaagtcatatccaaatattagtcaaattcctatatgtacatatatattaatttgtaaatttaaatgttattttttagttatgttaaccatgttgaacgggatgatgtataaatattatctaatggcatacattcagaaatagaggcagtacattgtatatgccgaaatctctgaactgatatgtgatgtccatcatatccttggcatatttattaacatatttattagagaaaaatggaagaacttatttttcatatatccaaaacaatccagattttttatcagttagaaatataaaagcttatgcaattatatataatactataaaagccatgctagacaccatattttctcccaatgtgttataaattactacattaatcagcgaaggaaaaaaagacttattttgtcgatcataatgatcggtctagattataatggtgtaaattgattgacagctatatacaagagacaattgtctttatattattagaagaaagggttgtatatcaattatagacattttcaaataaactttaatctagctccgctcaattgtatgggaaatttatatactcctcaaacattagcatttgatctttatgaaaaatacaaacctatattcagatgcaaagcaacatgtttatgtattagcatcatgcaacaagtacttttactctactttgaaggtggtgtgaatgtccaaaacaaataagtatttctaatcggtgtggggataagatattgtcacatatctgggcaataaattttttaattatttgtatgtctaaataaatacacatctgtaccctagatttgaattttgaatgcttgaggaaggagtggtcaggtaatgattcaaagacgcatgattcatctcccatgtgttcactttttttatttgaaaaatagagtacatatagtgaaggtctagtttgtgtgaaagatgtaaacatagactaccaaagtgttgtgctttgtgctgcatgcacatttgaattgatattcttctatctcttctttgctctaggagcaacaaaatgaaaatgacaagatcaatctcaagcttgagctccagaagtttcaaaacatacatgtaatcctcaacatcaatgcacatgtgtatcggctcccatattgcttgttatcctttcttggcgatcgcctggtagtcctacaacttggtcgatggtggaactccgataatagcacatacttggaggtggaggggctagagaaactgaatgccatcggcaacctcaagaaactccgataccttggcattcgtgggttgtcaaagctgacggagctacccaagaatgtcaacaaactacaacaacttgaagtcctggatgttcgtgggtgccaaaacctgacccatgtgatgtcatctactgtcaggaaccttaggcagttgacccatttggatctcactgaatgctacatgctggagcatattggatgggagatcacctccctctcagagcttcaagtattcaagggttttgtctttggcattgatgcaccaaggagatatgtattccaatgtcgagataggcatgcgtgtcatttgcaagacctcaaggcgatgaagaatctccaaaagctcagtatcaatgttacaactgatgcaaatgttgacaagaatgatatggggcaacttaagcatcttgaaagcctccaatcactaacaataacatggggtgagttgccaagcatcttaacatctgcagaaagagaaaatgagaaaaagcaactccttgagaggtggactagcctagtgttgccgttaagtcttgtgaaactagatgtccgatgctatcccagtgaagagatcccatttgagtggtttgaaccaaaaggggccattaagcccaaaaacctcaagaaactatatgtgagaggtggagccgttaagaaactaaatcttcccaaagataacaatattaagactctgcgcctaagatatctcaaggaatttaaaatgaaatgggaagaaatattgggtatgatgaacaatctccattatgtggaagttgtttacaaggatcctaaggtgatgaagagtgaaaagataaaacatcaaacagataatgtcgagctacaacctcacataattaaggagaaggaaaagaaggtaaaggaggaagaggaaaaatgtatggcggagatcaaaaaaaatatgaggataccagattctaccttggatgagcatggggtgtggaagaaggatcaaaaggaagctgatcaaaagaaggcaaaggaggaagaggaaaaacatatggcggagatcaaaaaaaatatgggcataccagattctaccttggatgagcatcgggtgtcgaagaatgatcaaaaggaagttgatcaaaacaagaagggcaaaggctgtgagggtgatggggatggaagcaaaggtacacacttcacctactatcttgcctttaataaattttgagcatgcaattgatttctatagtttttcacacttctactatataactacattccctatttccatatgctctagaatctagtaactctcagagtaaggtgcatgatggtcatgattccaaggctactatcaacaataatgttacaaaagtttctagtgaatccgacctgacgggaaaaggtgaaatcatgatgctacataatatttttctacaactccatacacatttatattaaactacattttacaatttttgaacatttagaaggtgctcaaggtactaattaggatgttgatatcccaaaggaatctcacaatgttgaaaatgctcgtacttgtaagaactgtgaatactttgagaaaattaggaagcaccatcataaagatagcaaatggaaaaatgtcatcgcatgtgaaaatgatatgtggaacctaatttttttgatggcaccaagaaaattggatcacattcattttgtataataaaattcaaaaatatatatatatgcattttcatttgaatctttaaatgatgttcaagctcataataccgagctacccaaaaaaggatactccttaaacagggggtcgttgccgatcatgacaccttgagtgccctaaggtatttctaaaaaaaaaaggtgataatggtggaaatatacagttatcttctatattagaagatggagatcatcatatataagagttttaatcactcatatattgtacctttcatgtagttttaacaagaactaatatgtgtttgcattttcagaacaaaaggaaaaaacaagtaggcggtcctaaagtgctcctggcatcgatatactactcaagatagtaaatctggtactcccaatgagcaatcctctagagtaaatgatgcattggacacacctagtgagcaacgtgatctgaaaggcactgtatctgacacattcagtgagcatcattctgaataaaaaactgacatatttgatgaataacatgctagcaaaaataagggacttggcggacctactggacaatgatatcctcaatgtgagtggccttgaaacctagaaaacagcctcaaaggaaagtgattcaaaatcaacaccacaccttgcaccatatgtacatatggtgctttggccattggcaaagaagttatagccgatgacatagaaagtgacaaatagaagctccagtaagaggtgcaaaattatgcagcatggagagtcgcctatcatcatgtgtgttgtatttgtgtgtgtaacaagtattcaatgcaagcataaacatgtcttcaaattcttttggttgtttatagtcggtcctcaaaccatttaaataagattttatcatctcggtgcattggaagagcttccaatttgttacttatgcttgttgttagttgcatttattcatttacattccacaatattgtaaacattatagtgtaattatactactaagagtatagctacatattgattaggcaactggcctcctttatggtaaattcatctgaataatagtaattggtttcctcatgccacaaacagtgtatttgccaaacatcaaaacatgaatgagtgatgaatgagctaccttatgcatgccattttattcaccaagcacatatatcaattaaatatcattacatcttaaagattgtgatcacatttgaatgttatcatctaaccatcctccaatcttcatttgtttttaccttaaatattttatgacttactctcttcgtttcaaattaattgtcgcctaggtttgccctaagtcaaacattttaatctatgaccatcaatttttataaacacatagttttcttaagatttatatttttagaatctctatgataaatattttgataatatataattcatatgttgttaaacaacatgatttctaaaaattaatggtcaaagatagacatgtttgatttaggacaaagctagaatgacaagcaattttaaacggagggagtaatgtgcaccatcccaaatggtaggagaaacatgtggcccaccaaaaactatcccattacaagataagatagttgatgcattacttgaatttggaattcttaatattgattttcgatcggtttgaaccatcatgtgttctatcgtatatgaaatctttagagaaatgtctcttgacgccaacttttacattaaacataatgttccaacaatagtttgatttttttgcttggtcttaccactatactatcatcaacaaatttctaggacatgaacaaaccatttaaaacaactgaaactagacatgtggaacattaatccattccaattttgatgttaatattgaatctatgaactcttgaatatcattggagaatttattgaacatatattgaaaccaaacaaagaccattaagcaattcctcctgaaattactcaaaggaactttatcgatgataagtaatagtaatgaaacatgatgcattgaacatttcatttttaccttattgaagttccaataacaacctgattcattttgtcctatctaccttgaacatgacatacaattttgcagtatggcctaatttctaaaatataaggagtaaatggttcaaacataattaattagatacttggtctaaagatgccactatttactttcaaaatttagaataactgtaacaccttagatttcaaattccacacaaactcaatttttttcaagaaaactaggtgttggctatgtagttcctagcatgaagcatgtgccttgtaccccccctccccgcctttaccggtgacgaggaagaagctcacatcttgtgagtatgataatcagcttggagaggaagtccgtacaagtaccaccagctttattcaaaaggagggattggcacaacggtgatgagcacaagccaaactactctaccagtgttcatttttcaatctgtggaagaccatgtaatcgaagttcaagctctgtcatcaactctatcatcatgagctataaagcatgacctaccaatgtggagaagcgagttgcaatcatggattggatggctaggttccgtggatattgccaccattgctcaaagttgccaccactttctttttgtgttgacaaagggatagagaacaaaaaaaaaagttgactctgtcggagagacatcccagcataggcatgaagttgagaagatgtaatgataagaggcacatgctgcaatcacgtgtaactctgatagcctattacgtactgaacaatgttgacttctgtttttttttgcttgacctaggttgagccatagggaatgtaaacggagcggatacgaacagataacgttgataccatattatttttcgtatttttagatggatacgaaaatgaatagagatggcaacgggtatggacccgacgggtttccactccccgtacccacacccattgaaattaaatctgcccactacaaaacccacacccgcacctgcacgggtgatgggtacccattgggtacccgcacccgcacgggtgatgggtacccattgggtacccacacccgttgcaacaatttcaatattgcacaacaataactcaataaggttataggctgcagtgatatgtacacggtaggattgaaaaactaaggctcaaacaaaccatacaggatacatacagcctgccatattgcaaaatcaacagcaagccatgcaaccacattgcaaaatcaaccagcaagctacgcaaccccaggaggcagcgtccctggctccctgcgcctaggcggcgaccgacgcggtggatgtccgcccccacgctggtggttccccgcacggcggcgcccctgctccaccggcgcgactgagaccggtcggcggctggtgctgcggccatgcgcgcctacgcggtgtcgtgccggcgtgtggcgtgcgctcgtgcgcggtggcgcgccgcgtgcgcccgtgtggtgcggccgtggcttggccgcttgggggatggaaggggcggcgaagaaacggaggcaggatggagaggagaggaggagaaggggaatagggtttagaggagtgaggaattgaggatttatacctagggttttgatggttgtgggccttgggccatctgcatattgggctaggcctacgggtattttcaacccacgggttaatgggttcgggtgacaggagaacgtacccacacccatgtacccgatgggtgaaggttttgcccgttaacgtacccatgggtatgatgtttggaacgtatatacaccctagtagagtaaaaacccaacgggtttcaggtcacggggccccattgccatctctaaaaatgaatagcttggatacggaaacatacgaattatctcgaaccaatataaggatcgtatgatggacacgaatacgtaaataatatttctcagaatacaaaaaccacctaaacttataatagaaacaaatagaatcacacataattagcttattttatataaaaagtttcatcatagactaaacaataccaatgaagttcaacacatacaacattactagtataaatgcatgcctaactagtattataacatattttataaaatatttaaatgtttaactaatattaatagtgtggactagtactgttagatgggctactattaaaatctaaagaggtaggttgtaggcgcagagttagcaaaaaaaggggtatatttcatgtcttcatcagatatttgaataatattgttcatcatatatccttattactatctatatccatcggaaacttagataccatatttgtattcgtatatgatgaaaaatatccgtatttgtattcacatctagattatccaagtattatccgctccgaaccgtattcatattcggttttcttcggagcagacgaaaactatccattttttttatcccctagctagttagcactgagagaacaagaaagaggaggatgaggagatggaccaatgtggtggtggcctagtggaacccacttcttgcatttattgttagatgttgtattttccttaggtcctcatatattacgtacaagggcgaatcaatccattgggctttcacttggaaccctacgtatactttcattatggcacgagttagttggtcaaatcatcatcaaagagcaacaaggatgatgattgacgacttacggaaggagatacctaaagtcatgctggaccattgaaccatgttgggctatatcctctaggctagttagttagtctatacacaataactagtataagacgattaataggttggattgggagcttatcccctagaaaagtaatatacttgttgcgccacatgggagaagagcaaataattaaacataataagtgatagcaggttacaatttgggtgatactgtgatagagcagtcaattggtcgtgagcaagattgacagtatcgagatacactatgatattacccgggcaaaacggtacgtgccggttttaggatcattttcgggtggtatcgcgctaatattaggatatgagcataggaccattagaatcatgctaggatcgagatactaactgtttcaaactaacaatatttgaattcaaaaatcaaaactatctgaatgcatttttgttcatgtatcttcagaatcgttgttcaataaaactattagcactaagtgggtggttttctcttgacaaatctctcttttttatgttatatattattatgactacatttttatagaatggctatatataattaatataaatattaaattaaacttaaaaataaaaatcttatagtatcccgataatacgacacaatcctacgatccgatactacctaaaattagggataaacatggattggaaatggacagaaactagctataacatatttgttttctttcttctttttttttgtgaatcgaaataaaaaacgaaaaccccggatatagaaatggaatcgagtacagataatatagtgaataagaaacgaaacgaatacggtaacaaatatttctcagaataataaaaacccctcaagagatatcgcttgttttttttttgaaataattggtcaacatttccaaattttatatcaccaatttggtaggtaggcccacaatcgtatgtgaaaatctattttcctagcattttctaagagacccacatgtcaatatgattacccacatcctagtccctcgatcaaacccatgacctcttccttcatgcatagtttacttaccatctcatttatcaagttcttattggctagattaaagatactattcattttatttcgcctctccgaaactagtaatatttgttttaagcttcaaatattttcaaatacaaatgtcataaactacaaagtattagaccctattgaggtcaacaaatttgatataaagcatgtctccatagaaggtcgtttgaattgtaaattccagattttgtaaaaacatatatggctttttataacaaatatttacacttgtaaatgatgtcaaatgataaatttgtcaataacaaagtagtagaactcatcgagctctacaattttgatatgaagttattcttgatccaacttcatatgataaagttatgtatatatacgtgttttctaaaaattaattgctacctacggatatccggaaaaaaaaactccacatagtttatgactgtttccgatttccgaatactagtctaccatattcgtttccctttatagggaaaaaatatcgatatccatttctgtattagaaaattatccatccgatactatctgtttccgaaatacgtccggataacggaaactatccgaaccattttcatccctacctagagtctcgatactagcaaccttgtggatggcagaggccgtaggcaagatccattctcgcgtttttgaaaaaaaataataagaagaatggtaaaatcaatgacttaacatagaagtggcaaaagtaaatagtgatttaagggcatgtttggattgaagccaattcttgccctatcaattatttggtagttttgaatagtacttgttagctatttggattgaggccaaatcttacaaatttaatagagttagaaacaaaaaaaatttttgtagtaccaaaacctgcccaagatctggcattaccaaaattgggtagagcttaaaaccaaaacaaccctaaaacccattattcgtcgagttaaaaagtgacaacgaaggccaatcctcctctgtgccggcttgaccgggccgggctgcccatgggccatggcaagtctagctgtccttttttttttttttacaattcctttggttttatcttcactccagtcaatgacacctctacccccacatatcccttgtccccacctatcagtggcacactccaaccgaagaaacccaaatcctcccccttcgcagagcccaccttccatttccacgtgctcattcacgcccgcatcataaactgatactctgcgacccaccaaaagcagcatccatttaatttaatttaatttcccctctcctttattttttttcccaccccccactgatttcctcccttttttcttaacatatattatattaaacgaggcgactaattcttcgccgtagaaatcacaattccgaagcagaaacaaacagcgacgccatcgcgtcgcgtcattcttccaatcgagaactcttctccggatttcctggtttttttttcttcttcttcgtcgtcgtcgccccccctcctcttcgattcgtccgtttcccaagagcacaatggaaatcgtaggttttaggaacaggaattcgtattagcgagtggtaattgctgccggttggtggataatcccatttcgatggctcgatcggcggtttaatttgcgaattcgtgagttctttttttattttggattctagggttctcgattcctcctccacgcgagggaaggaaaaagttgcggaaatcgtaatctctttcgttgttgttgcgtccttttggctttaacccgcaggaaaaattgtggtgaatttctcgtggactccggcgcggcaagggtggaggaaggcgtggaccgcgcgcgatgcagtaccaccagcaccggagcaggctgccgccgccgccgccgccgccgccgttcgggcgcggcgggggtggcgccgggtacccccgcggacacaagcagctgtacgcgcctccgcctccgccgccgccgcagcatcagcagcagcgaaggtacgaagtgctcatggaggccggccgcctcgcggccgagtacctggtggccaagggcgtgctcccgccgtcctccttgcagcgcggcgtcggggcgtggggcgctccttctcctcctcctcctcctgctgcggcgggggcggcgccgcacccgccgcagcagcagcgggaggacccggcgttctatggccggagaaggtatgatgatgagtatagcaacaactctagcgcccggcctaggaggaacagtagcaacagtagcagcagcagcagcagcagagatgattacagtggtggtagctacaatgggagaggcaagaggaagtatggggattacaggagagggtattcggattgggggagggatagggagaaggagagagggaggccgggttcgaatggccgccgctatgaggagaatgacgatgaggatggggctcctggtttccggagggagcggaggggcagtggagggaatgatgatgcgaggagtagcgttgccgacgtgtatagggaggcaacaccattgatgaggaaggaactaggggatttggaaatgaatggtactgagtcgagggccgcgaatcccagtggtgaagttaaggaagctgatgctccgcagatggtgcagagtgaagagaatgaggaaggtgagatggaggaggatggcatggtgttgaattcggaaccagaggttgtggagctaaggatggacacaaatgatgatgttaataatgcttctgttggtgttgatatggagacagagttgcagcgttcgcccaatggtaacgttccaggtgagaaagccgaagatgacgacaaagttttggttgagtctgctttggacagtattgctttggatgatgaggtggcaaatacggaaaataacttgcacggtgatgagaggaatttgcttaaatactgtgaatatgcaaaagctccaactaagcgcaggtcatcacgtccacaaaggaatgcagcatctgtccaaatagaaccagcagtatctgaaacaaccgatcagatttctattggagaagcttcccagatagtacctggtgaagttgcaaatgagatctcagtgaccaacctcaagtcagaaaatagagaagatcaaatctaccgagaaaacactgactttagcacttcctgcaatggtacattggagccaattcttcttgaagaaaacaatgagtcagctgcgactggaaatataatagaagaaaagaatgatgtacagctccatgtggtcaaggaaccagaggaagaagtaaatgtatctgcattcgcgccttctcacaaggatagcttgatgcaagaaactgacttatctccatcaacggcttctcacaaggatagcttgcttgagggtaacttacccctgttgacagattctcacaatagcttgattgaggaaactggacctccattgacacattcccatgaggatagcatggttgaagaaaccaatctctcgtccttgacaacttctcacaagggcaacttgaaacaggaaacggacttatctcagacaatatcttctcatgagaataacttgaaattgcaatttaaggaaagttgtggcattgatatgctgccacaagatgtagacttgattgaattgtctggtcaacggaaaagtgttggtggtgaactattttccaatgttggagctgaagctgcctccaaaatggaagatgaaaatctagagcaaccaaatccatttaaaatatgcgatcagaacttgattggtagttctgaggtttctgtgatacataataatcctggtttggcccaatgctctacagaaggatcttgcacagagtcacagaaaaaccagcatcaagattttgtaaccacttcaggtgatattgctggtagtacaaataatatgtgccaacttccattagataataagggtgtccaagtaattgatatagaagatgacacaccaattgaagttggtggctttgattcttcaaaagcaaagtgagttgcttctattccagttatttttcttgtctagcatgctgtttgaatttgttctgtttctaccgtagtgttttctgccccttttattccattagtgttactgtataatggtgtaggaattagttgctagtctccttaaaactatttgtatctctgtttttctttcatggtcaaagagctgtgttaattgttcatgggggccaccttgttgcatcaggacataaataatatgattgttaaatctcatcgtagtgtttgtatttaaaagatataatgtgcttttgatcaggagcgacatgatatgctctaacatggataacatgatgggccctgttgtacacagtggtgatcttcctggtattcaagatggttacaatcttgcaatttctgattatcttggtggtgatataccatgctacccatcaatgcaatcagatcttcatggtggtataggtgctaatgattctgaggtgagacatcctgattagttatcacgtggaggctagtagagttccaagagaactttgcaagaatgtaatattgcactgtatttatttccgtagatgatgttttgatgtttttgttttccttttcagggtatcactgtcatggatgatccaatatatgggtctctcactgatattggtaattgtgactaaactttaagtttccttaatctgcattatctcttttctttcttgttctgtatggccactttgtcagtctaagatacataataagtagttgccattttcagtttaattttttggggggatggaacattctagtactaggctgttctggtgtatggttctggtatagaaacatttacaaacgtgttctattttatatactgtttttatcacatactccatgcagagaaccccagataactccacaattaagtaacagagcatgtattctgattctggattcaatggtccatgatagccaagagtggccatggcaagttggacagcaacagtggtaacgtcaacttgtcatgaagcagcagtagcacgtatgcaggaaggcagtggctagttgattgacttaggaaggggataaaacattagttgtattcccttatggatataccccttcaggaacaaattgttgagatgttcgctggttcctcccaagatactatatctgatgtaattggaagccaaaaataaaaataaaatcacctaaaataaaaatagaaccaggtcctctctcctcaatcacttctcctaccaagcatcatctttagcactttctcctcaatccatgccgtgtggcctcttcaggtggtagttactccatagagtcatcctatacttcactttgtcttgtcgcatacaagttacaagtgagccttgtttagacggcacatgttgaacaaatggggattcctggtggaataacaagacttgacacacattgaaaatcatggatagaaggaccatatatgccaggaaggaaaaggctgtgatggttgtcaacttctctctggtattagaatagttgaaatggcccatagcaacgagatttcgaggcaaaaaaacacacccacatcctttgtgttaggaaagaaaagtagaatgttctagacttccaactgttccagctggaagactctttaatgggtagacccgcaaggtgcagttcctgctaacttcaaaactaagaaaaaatattctctcagtttacaagtgatttcaattaatttggagattaattagacacaacaggagatccacacaatatggagggagcaagtttcgggtcggagtaactctgaattcaatcagaataattaatcactcatgagaaaacacatgtatacactgtaggtctttgtagaacttctacgggcatgattgccatatagaaatccatttatgtccagagtgcctagataattgtgacgaaatcactcttctaaatagcagccttcatgatctcaacatcaggcgccatgaaggcagcaagtaatagtatgtctaccctggtgccatgtgcatatctgtcgaatttcaagatttagaaatccactttagcagccctcgaaaagctttaaaggcctctatagcagccgaaagaaaacatgctcaatatgtagctacaagtagctgaactgggataataactagaaccttattatttgttacttttcgtggaactggaatataggatagcatagaggaacttgcgtgccattactgggatttgaaccagtgatttacagattcatgccattgctttccttttgataattgggcatgtttacccctgtatgagtgggcctcatgttcatgcatccccacagtccaccgcacagaactctaccttcacaaaccacctgatttattatgcccttgtttttctatgcttctcgttctgtacagcaaattactgcatcaaactctgcttctaattttactgaatagatgtttggcacatgagcacaaaacatttgttcattagtacacggcaacagtctatatgtctatatctgccagttatattagactaggaaccaaagtgaatatattggattgtaagagtatactgtgcgccagtgaaatgaacggcaaacgtgtacaacaccttgacaaatagagttgttcaggattacttgatacaccgttcaaatgttggcatggtgttaagttcatttttgttgcaagtgttgccgctttggttttctatggtgtaaccttttgatattgtttagcacttcgaaagtcccatgcatcttttttttcccgattttcgcctagaggctaacctcatatgctattatggtttcaggtttcatggatgtctgggggcagccaacacaggatgactacgagaagttcttctagtccgctgcccaaagaaggctgagattgttgaggaactttacaaataaacctgagtaatcggtagcttaggcgagaataagtaaagtagattgtgccctcgtctcaaagaaaatgctgtatcggtcttagtttagcgttggtactcaggttgttgggggtgaatggtggttgtttaatcagaggtgtagtagaagacatgtgtaaggccaaacagccggacagcacaggatggatagcttttttcttgtttccctttttgatatgttggtgttctgttctgtagaatgattccgtttggatcagtgtatgctagttcctacaggcaaatgctgcgtctggatctaatgggttttgatctcgttggcacgatagcgacttcaaagcagatccgagacacttcgtatatacttccgtttcaaaatataaacgacttctaatatatgcagttctgttccgtttatactaaattactaatcctgcaattctattccttttcaaaatataaacgacttctaatatataaacgtcttatttaaaagactatgaaattattatttatttattgattttgtttgtgacttgctttattatcaaaagtagtttaagtatgacttatcatattttatatttatactatttttttaaataagacaaatgatcaaatgttgccagcataaagtcaaaacggcatcaaatttgggacgaaaggagtatttgatccgagatactttcgtataagctaaatataaggacgtgactacatagctagcggtagctggtccgtctaaaccaactaccacttcatctatgagacaccatatccacatatacttcaaataaaattttctcttaaactactcatcagatctacgattcgattacaccgttgtgtttgtaacaattaaatttttataataagatatcacatgattatattttgattaaaaattataaattaattttatagtgtatctaaattacctttagatttcactaaattacttattagacatataaaagtaaattcaataaagcctaaaggtaacttacatatatattatattataggagtaacttataacaaaaagaaaggggtgaatagctaatttagtccctcaagtttcagcgaaggcttaatttggtccttcacgtttcattttgtccacatagatccttcacatatttgttttggcttgaaatcatccttgggtccacttaatatgccatatggctatttctagtcaatatttctattagaaaatgtcatttttgtccttaatttgtatacatctatatactagaaaagagaaagccaacatgaataaacaatatctgtatattacagatgtacttcccattatttcaacatatgcacatgaaacttaagcaattgctattgtatacacttgctagtacataatttttttcgttttacataatatactatgtattatctataaaaaattcaagcatgcaatttctctcttatacatgtgaatgatgaggggtataagtgtcatttatgaagagagttgttggttcaaggataagtttgaactaaagtgaaaacttgaaggactaatatggatatattgaaacatcaaggactaaactgagcctcagatgaaacttggaggaccactttggctattcacccaaaagaaagtaactttaatgaatgccttttttcattggacgtgactatacagctagtgatagctggtttaaactccatttagtgtctcctttcaacttgaaaaatgcaatagtatgtatcttttttaatctctttaataacttatatcttttaaatcacatattgtttttaagatctatttgcatcgttgtactccactcaaaatatgtgacaaaacgatattcatattgaatatatgtaaacattttattaatttaaaagtaatttattacatgttagaaagtaacttccatgttatcaggaagtaactattacatcttatacatggttaattctcattagttatttcatcaatgttatttacaatctatcaaaggttttatcttcttttctcattctacatgaaaaacaaaaatgaaaggaaaaaaacaaatcggtgattaaacagatttatagagagttacttctgaaccatacaaaagttattttcaattcacattaaagttacttttaaaaattgttaaacttacatgtgttaatctgtactgattaaataatgttttctagataaagtcatatttttatccctacaacgaatttatttctaatgtcgtgacaaagttacttccgttttgttttaagttacttttataatatatgtaaattacttgtatactttattgaatttacttttatatgtctaagaagtaatttagtcaaatctaaaagtaacatatatatatatatatatatatatatatatatgataaaaataacttgcgtgtataataaaagtaatttacaaatataaatattttttcatcgtaatataatcatgtaagatattgttgtgaagatttaattgtaacaaacataatggtgtaatcggattgtagatcggataagtaatttgagagaaatcttgatttgaagaggaaaaagacatacatatcttttaaaaatatagcatgcatatagtagactactccacgtgcatgagacggttcgggcgtcgctcgttaaggcaaaagcgagaggcctctccaaatagattttgataataatccggcctaggtggggttggccgaggcccaataaagactagtctaataggggaaggatggctctcccttttaaggtggcttcctcctcccaagctaaacaaggtgggattattcagaggctcacacggtcgccgcccgactttggtgtctgggtggctctcccttttaaggtggctctctcctcccaagctaagcaagatgggattattcagaggctccacccttttaaggtggcctcctcccaagctaagcaagatgggattattcagaggctcacacggtcgccgtccgcccgactttggtgtctttgccagcgggtaatagtggaggatgtccatcattcccaccccctaaacaagggctgattattcagtgtctttgccagcgggtaatagtggaggatgtccttcatcattcccacccccttaacaagggttgattattcagaggctcacacggtcaccgcctgactttggtgtctttgccagcgggtaatagtggatgatgtcctcatcattcgcacccccttaacaagggcccagttttgataccaaatgataacaatccggcccaggtggggttggccgaggcccaataacttaagattgtccggaccccaacagttcataggcacacccactcggagaaatgcccaatcttcctaaaagactagttcaataggctaaaagactagtccaatagggaaagcagggaaagcgtggctctcccttttaaggtggcttcctactcccaagctaagctttggtgtctttgccaacgggtaatagtagaggatgtcctcatcagattttacctaagtataaacgacagttctgttccgttgaattaactatttgaaaagagaaccgcaggtcggcaactgcctggacaaatgctgccgtgacgtcactcagaataattaactcttaacctcgtttatatgtcctgcaatatgtgtgcactacagatgatccgtccagagcacacaaacagtccaacacatacattcccagaacacacaaacagtcctgcaatcctctattggggcaagcgatgtgtccatagcacaagtgataaatattcagtacaaaaatttgttgtttattcaccaaatcgtctagcaccatataagtccatgttcccatgcaacaaatgtagccatggctctggggtgagtcaaaattataagttggttgtactatctcaaaaataagcaaaagaaaacgtagtctgaacaacagtacgtaaccacaaagatacagcaaaagaatattgacatgccattatattcatgacagacaagtgttacaggcattatagcctgataaattagtccgctcgggattgaccagcacgagatgacaagatgataccaacaatgagaccatagagtgcaagcgcttccgcaaagataaggatgaggatcatacccacaaacagttttggctgttgagcatttgccctgagagcaaaagtagattatgttagaacagcgcaccaagcaaagcataaaaatcaaaattcctgtggttccaatcaagctgcacaaagtgtcatgaaatggtactaaatgcgatcatataatccatgaaactgtagaaggaacatataaccattgagagacatacatgcatggtttcctttgtcacaaatcaaggtacaacgataaattactgtaaatcatgatttgaaatttaatcatagatcatgcaacatccagttatccagtaggtcagtataccaaaagaatcttagctgcgatcacatgaactgaccgcaggcatgaattgtgcagtaatgtagattgacaaaatggcttgtaaagtttggctgaactacaaggacataactttgcattgaaaaggaaaaaaaaaagtataaccgcatccattggtacgttcctagaagggccaaaagtgttcactaaataataataaagtcaaggaaagtcaaacttgactatcagagcaaattttaaaatacaaaactcaactcattaagaacctcaattacctgagacatttgaatatttctgctaggcatttaaatagcacatagacctatccataccatacatatagccagttttaatttattaaagaaagggtcaattacttggagccaagtgaaactctgtttatttagtaacggaagaattttgcattctagaacaatagcccctagaataagggtcaacatttacatggcgctgaacccctgatatgcatgggattgactttgctgcccaaactctgagaatcataagcatagagatgtttcccctttgtattctttttttcctttaagaaaatgcaatgccatcaaaaattgatgatacaatttatgtaaagttcagttacagtaactattgtaaagttattagtgaagtgaaacatgatggctatttctaactaaattaacatatcaaacataaattacatccataacagctgtaaagtgggtttaggatcattgctcatatccgcatatcacattagaaagctctaagattctaaggatgtagacatgtgagaatgagtaaaggatttctcttcttttctcatgactccaaacaaatcacaatttaatggcattaggcactatagcagttcagcaattttacctcattccggagtattattaacaaatccacatcaaaaaaagtttaacacattttgggtgggggggatttcgggatggggataacctgacgccggcgtcgccgacgatgccgatggccatcccggcggcgaggccggcgaggccgcacgcgaggccggaggagaggtgcgcgtagccgtcgaagaggaagtagggcttggccttggggttgatcccggtgctgatgatgacggcgatgatgaggccgtagatcccgagcaccccggccatgacgacgggcacgatggatttcatgacgagctccgggcgcatgacgcccatggacgccaccccgacgccgctcttggccgtgccgtaggcggcgcccatgcaggagaagacgagcgccgccgcggcgcccaggaagccgaagaagggcgccgtctcgtcgccactgaaggtcgacgcgccggccatgggggattggattggatttggtctcctccttccttgcttgcgatgaaatcctagggcgtttgatcgaggattgggggtggtcgcgtggggttggtgttggtgggggaaagagaagaggtggtggtgggggtgaggaagaaggaaagagatatgtggcggagactacggggctcaatgcttcaacttgtcacaccatattttaggctgtcacatgtctttagagtcttatgtttggtttattgccatggttatgacaagtcgtactttcttaccatcttaccccacatgttatagactcaattctttgtctaactttgccacaattgtggcttataatttgtaggtcataaaaactgtgacaagccacacttatctaacattgcctaaagtgagttatggcaatgttagttaagaaccaaacagcctctacatctaccgtgtaaactatagtaaatttctgttaaatataaaatgtacgtctgtgatctactacctccaatctcagaatgtatcaatctaggatggacaatgtatttatatatgaggcgtgtccaaatacattgtcctaagataggtctcgtctcattttaggttgttatattctgggatggagggagtatctacgtcgtacgtgttgaaactttcagaaacgaccccgtctcatccagacatttagcacgttaaccccctcactctacccactgcccaaatgcacaggggcagggctccgattcaaaatccatccccaaattggctactccaagctccagtgatgccagggagtcgacggtcggcggctgcctcggccgacattataggtcttactctcctccctcctcccacatgctctcccccctatcccgttggtccgtattctgtttttccccaaaatgtacttcctgttgagttggacatgttcctaatttcagatgagctaggggttcgactctgtcggtgctcatgtagggaaggcatgcgaattctccacctgtagctgcctgcatatccttctcccgtctcttccccctcttgcatctggtccctcatccattggcctgccagttccttccacacaagaggtactaatggtgttcctccattttatttgttcaattgattcccctggagcccttcctctcacacacaagatgctgatgttgctcttatattttatagccagttcttttttcactagtttgtgttgttgtcctggttactgtgaggtcatccacgaactgttcttgttgcttgggaggctgggactagttatgctctttattccatttttaaactattattgttcaactgatgcggtacctcctttttaggatgtgctcatcgagccctactactaattaaaatggttcattagtgaacatgactgatctgaaaaaaaatccagtgtaaaaattgtgcctcttgtacaaattaatagaattgtgtattttaacacatgaacaacaatagaacatggcaacaatgatgatttcatttcatatattttgttgcttagtttttaccattaattgggtgtgccctattataaaaataaaactcttacatataggattccaatcctacaaagtgttccaggagagtgaaatgagcatggcaaggagattagaatttgatgatgtacattctgatgcggagtcagttactacaggtgttccgcatcggcgagcccagtacatcaaacctcaaaagtctacaagcatcccattttgtgtaagtagtatcaacgccctattttcgttaactttagtattcccaatatattctttgatttttttttctcagtatgcacttcatagggttcatattttgttccagaatgtgatgattccgtggtgccacacatagggatgacttttacggatgtggaatcagccaaggagttttatgaatgctatgctcatagagttgggttttcaatccgtataggacaacacaagaaagttgatggagtggttctttacaaatgtttcctttgtgcaaacaagtatgctcggagcccacaagccgtcacctcctccaccaccgcggcaccgcgtctcctcacgcaaccacacaattgaccagcagttcttctctctcgctgttctccttccttctccacgctccagctcgttgcttcgctttggcatcggccatgatggccatcctctctctgttttggatctagcgatggagttgtaccattgtgagaaaggtgagaaatagaatgatgtatttgaaaatgtacatagcctggacgcgggggggggggggggagtggggggattctttgcagttaattacacaatgtttatatctgcagtttttcttaacatctcaaacatggtgcgtgagaaagtatacctctaatcaagtcaatctatttgcaaatgaaatgtacaaataactttaatttcacagcatgtttagtattcttttttagataataggtaaaacccatatatgggttcatagaccaacatgggtgtatgcagacaaacaaagtatatgggttcatagacccaccggttcatataagagaacagccacctttaaagagtataaccacacaaaaactccaaacgaaagaaaggaataagagaaagtttaagcttttaatcttcctctaaaattccagccattcctagaaaaaaaagctaagcacattggattccaatattatgcagttttttttcatcaaacttcctcattcatcctcaagcaacaatgcccattgtcgtgcccaatatgtctctttaaagatcacctgcaaaaataagttaattttgataccattaaataccacatcattctttcacaatcatcgtccaacaaagtgtcgtaatgcctccgaaaaagtgatactttagcgtaggttgacaaccgctaagccaaatcactgagcaacactattaggattcggaatctggcatttcataatctatacaccatctatagaagggcaaatgatagtgacagctcactttacataggtcataaaagattaaagctgggaataatatagacaatcagaatgttaaatgtaatttgaaatttaatgattcctttttataattgtctgacaaagaaatttaatcttcacttttcaaattaggaattattaattttgataacgatagtaattttgtgaatgctattaaggatataaggagtttagaaatatctaggttaagtaatgtttagaattgaaagataagcaaatttctattgtttcttctaaaaatgatttggttgatgaccagttggaggataattcaattttggaaaaactttgtactgaaattatgaaggaggtgattatgattgtaattttcataccaccttaggttttgtattatcttctctggaaaagagaaatggtaagaaagttaggtgcaagaaataaaatcaaagttgttttaatgaaagaaatttttggaattatgatgggtttaacgaacagaaaaaacataagtttatttctgactgtactaaagaacattaattagatttcattgctttatcagaaactattaagagagattttacaaattctgtccttaaaaatctctttgctggcaaagattttttatggtgctgtaaacctcctaagggacattctgtaaacctcctaagggacattccggtggtatgttattagggattaatttacagacttttgatattggcttatttgataatggtaatttttatattaagtcccatttttggaataagattgataagtttaaatgagctttagttttggtgtatgatccatcacacaatgaatttaaggagtagtcctgtgaaaaaagaataatgataattttgataacagatagtattttctatataatgttattatagatgacattagtcttagagagcttacaatattgaggaggaattttacatgggccaacatgccaacttatgagaagttagatagaatattaatgtcgacagtgtgggaacaaaaaaattccactgtccatagtgtttgctttcaatagagacataactaattacacttctttacttttaatataaattcttcttctatttgtaatagccatagagacataactaattacacttatttacttttaaacacaaattcttcttctacttgtaatagccatcaaaactttaagattgatttaggttggctgttaagggatggatttgtggatatggtcaaatttttaagaggttgggccaagtagaatattggctcttataaaatagagaagaaggttttgttagaaaatcttgattttcttgataaaaagctgattcaactttgttaagtcaagaagagcttgatactaaactttatttgatgaatgggtcattttgtttgctaagagaagaggaaattaaatggtatcaacgagctaagactaaagatattttgaaaggggactcaaatactaaatattttcatttgataggaaatggtaagcataggaaaacaaggatttatcagctacatcatggtggtcgggtaaataatggtgatgcgaatttgaaagtgcatatcacaaacttactataaagatctttttggccttcctgaagcttcttctttaacgttgaatgaaagtcaaataagtgatattccccatgtttctcaattagaaaataatgctttacaagattttactaagaaggaaattaaagatgcaatttttcaaatggaacgtaataaagctttccggatggattcccagctgagttttatcaagttttttggattgttattaagccaaatttggttgatttatttaaagatttttatagtggtagtttacctctttactctcttaacattggtactattattttattgccaaagtgtaaacaggttatgtagatgcaacaatataggcctatttgtttacttaatgtcagtttcaaattttttactaaagttgctacagatagaatttctggagtggctcagaaggttattagtcccacacagacaacttttatacttgggaggaatattatggaagggcttttcattcttcatgaaacaatacataaatttcaccataaaaaaagagataatacaagaaatgctattgacaagcgtccaagtcccagaaatgccattgacaagtgtgagttccaagaaatgccatcgtacaaacaattttgtcccaaaaatgccatcgtcgttagggttccgtccaatttgcgtcgttaaatacactgttcatcctatataacttaacggcgtggaatggatagaactctaacggtgatggcatttttgggacaaagtcatttgtacgatggcatttcttagaactcacacttgtcgatggcatttctgagatttggacgcttgtcaatggtatttcttgtattatctcaaaaaaaaaggagtggtgtactttttaagattgattttgaaaaagcttatgatagtgtaaatggtcttttattcaacaaactttgagaattttcaaacctataaaggtttaaggcaaggggatcctttatctccaattatttttaatatagttgttgatatgttagatatattaataaagatagcaaaagatgatggtcagatttctggagtggtcccacatctgcttgataatagtttatctattttataatatgctgatgatactatcattttttagagaatgatatagagaaagcaaaaaatatatatatgaaattgattttcactgctttagaaaaattatgtaacctcaagataaattttcataacaacgaattattttgctttggccaagcaaaggaatgtcataagtaatattcaaatatttttgggtgctactacgagattttcatattagatatcttggcattcctatgcaccttagaatttagtaataacgattgattaacggttgaacaaaaaatttgggacaaaccttgaggtgataaatgaggttaaatcattcttgtctcaaaattttgatatgaaggatttgggtatagctgatgttatcctaaacattaagctaattagaggtgagaatgggattacactcttgcagtcccattatgtggagaagatcttgaatcactttggctacattgatagtaagccttctccaacaccttatgatcctagcttgttgcttcgcaagaacaagagaattgctaggaatcaactggaatactcccaaatcattggctcacttatgtacctggctagtgcaactaggcctgatatctcctttgctgtgagcaagttgagccggtttacctctaatccgggagatgatcactggtgtgcgcttgagcgagtaatgcgttatctgaaaggtactatggaattggggcttcactatactgggtatcctgcagtactagagggatatagtgattctaactggatctttgatgtggatgagattaaagccactagtggatatgtcttcacactaggtggtggtgctgtttcgtggaggtcttgcaaatagaccattttgatgaggtcaatcatggaagcagagctgacggcactggatactgctactgttgaggcagaatggctgcgtgatctattaatggatctgcctattgttgaaaaaccggtgccagctatccttatgaattgtgacaatcaaacggtgattgtcaaagtgaatagttctaaggataatatgaaatcgtctagacatgtgaaaagacgattgaagtctgtcaggaaattgagaaactccggagttataacgttggattacacatccaaacagctagaaacctggctgatcccttcacgaagggactatcacgaaatgtgataaacaatgcatcgaaggagatgggtttgagacccatgtgagttatactatggtggtaacccaatctatgtgatcgaagatcctgtgaattagaacctgggaagaacaaaccattagtaaactagaggagagtaccaatctataccctctctaagtgaatatgcatgtactcttgtgagctgcaaggctggttggctatgccttaatgtgttctgttggctttaattagcgaagatgctgtcctgcagaacattcttgaaagaactcacctttgtgagcttgactgttggtcgcagtctatggaaattttgggtgaatcttctaggaagctgtcacgcccagaaattcccgaatagaattccaagcagaatgtgcattaaaatccccgtccaggaccagccagggtacacaaacgacaatgttgacattcagatccacgtcttacaaacatcataaaagtcttacataaatgcagcggaaagaaagaaagacaacaggagctaagccttgacttgaactgcagcgggaacaccactccacaggcatcctcgacggcacggacaaagcctactcctcggagaaaccttcatctgacccaaactcgaactctggggttgggaaaagtagagcaagactgagtactacccactatactcagcaagtcataccggaataggggtatgatgcagggaatcatcaaagaagagctgaagtggttcatttgcataaagcgagcatttgaaaacagaaattgaaagatttaaacagttgtaataattaattaacatcaactatccactgtccaatgctaacccatgttgcgacaggcccaaccatccacctaaactatccaaattaaaagattacactaaggtgagactaatcacggtgaatctggttgaccgcccataaccgcgggcacggctattcgaatagttttactctgatcagaggtgtacaactgtacccacaagacacagccccacgacacgttaccgtgcgccgacatgccaccacgacataccggaaagaggccgtgacaggacccttcgcataaccccctctagccaagcacaccacacctcaggtttcacccccgtccccagcgggcaacgggcagtcccctctcgtgcctaggtgaatccggaagcgacagaggccgtcgcagggcccgccccgctccatcacgcccacccttgcctggatgcgtcgactagaggaaagatacactacaagtccagccgttgcccacgctggcttgtggtaagtacgataagttcttccagtgcatcccgcgaaccggtccttaactgccatgggtgcgaccagcaaaaccatgcacccacagcccaccatgtggtttattttaattaaccaacaccaaaacggtgtcactaatccaacaacaccattggaaccaacagtctaaacattaatatgattttccccgttgtgaactagttgaactaagcatggctaagcaattcctagtccaaactctaatcatgttataaccccaagctaacaaaggagcatggtatccgaaaagcatggctgtaacaataggtagccatcccatagtaatattataaaacaatgcaatatttaaaagaaaacaatagagcatttgcaatataggatcaacatgttcaagtgacaagcatgacttgccttgctctgctgctggaggaacctcggcgactatctcgaagtacaccggagcgtcggaggaaacggaatctagcgacatacaaagcaaacattgcaaacaggctataagactactgaaacagggaacaaaaccatttttaatggattcggcacagttttcttgatttactgagacttgaatgggcttaaacggagctcggatgaattagttatgatttttagaagatttactgtgtttaaaactatacaagaaaaaccttaaactatttattgcgcaatatattccagggctgacgtcagcacggagggagtgcggcgccgacatgcggggcccaccggtcagtgacccgggagagggcggtccacggcggatcgggtccacggaccggggaggagcggcgccgacatgcggggcccactggtcagcgacccgggagagggaaagaaagggcggcggcacggggctcggcttggctcaaggccggccgaccgaccgcggcgacggcgatgacgcgcgcgcgaacgcgttgccggcgacgcatgcgaccgacgacggcagcgaccggcggcacgcgaggcggcggcggtcgaaggcgacagcgcgcgacttgaagcggcggcgcggcactaagaggagaggaaggggaaaagaggggaggggatgcctcaccgagggtggccggcgcggaggaagacgatggcgaacggtgacggcaagccacgggaggacgacgtcggcgagcggacgagcttcggggtgccctaaggaaggaggagagagggattagagagagggagatgagccacggcgaccggaagccatggccgaaggcggcggtagaggtggtgctcacccgagtgcgagggaacgagggctccggcaacgaacctcgacggaggagaggtggacggggtggatcccggccacgcgaacccgacggcggcgatggcgcggcctggcggcgaccctaacggcggctagcggcggccggagtagcggaaacggcggctgcggatgggcgcacggcgcgagagcgatgggaggctcgagagagtacggcggaatggggaaaaagtgagaggggacgacggcgatgcttaaatagggggtgagaggaccggacgtggccgggagaggcgggaatcgccggccgacgtgggggagtgggggaagagagagaggcgggattcgaaaatcgaatcccggccatctcgggcgcggatgcgagcgggagagagaggagagtgggcgcgggagacgcggcgcacgcgcgggcgtggccgacgtggcccggaggaggcggagacgtggacgcggcggcggtttcgggtgcggcggttgcgggcgcggcgtcggccggaggaaggggaaagacccgacaggtgggccccacctgtcggcgaccccgggagaggagggaggcgggcagcctggctgggcctcggcctgcggccggcccagcaagggggagggggaaggaaaggggagaatgggccggcggcccattcgaaaaaaaaggaggaaaaagggagggaaaagaaaaagaaaaaggaaaaaggattttccctggaattacaatattgctggctcaattttaactggttaaaattatttctagagctctgaaaattccactaaaaatcctgttaatgaatttcgacatgtagaactcaagaaaaaaaattccacatgtcaaatccgattattatttgcattactttcttagggttttctcctgatttgcaccggtattttcttagggtcatttataaattacaattttggcttgggaggaaaacttcggggtgtgacagaagcttactaaagacctgggagtatgacttatacgctccacccaaggggtagtctacagacggtctagtaccagataagactctgagtgaaacttgcttgcacaagacttgcaattcaaggcgtagtccattgttcaagttgtgagtaagtgtagcttggagttctaggtggatgttcaatcttaatcggtctccatcgaaccactggtatataaacagtacattggaaaaggcaaatctcagtgggattttgagatttggtgggggattgttgaaattaatggatgggctaaggcccactcaaagattaattctttggaaaatcaaaaaagcctacctcatgggatggcatgcatggggagtttagtaccaccttgctttttctaggagagggggacttccttaaagggaggatgccctcctagccacttgaaacatgtgtggtggagagaagagagggaacacatgcgcgcgctcgctagcctggcctggcatggcaggcggcgcacgtgcacgacgtacgtgtcaatagtccgcaaaattggctcctcgcccttgcgtagatgcagcctccttttgcagttttgttttcctatgggaaattcagatttgttttgttttggaaacattccggaaaatccggtgcatgaaaatggcgtggagtccagataagttacgcgcgacttattcggttcggttatgcggagtgaagatcgtgcgggcgccttgatcaagcgacctatctctatataaaccgagtcgtcgccttcacgcaacacacgcgaaatcaatctagggtttgcctcctactctgtgctgcgccgtcgctcgtagactactccatcccgttcgccggcgtgcaccggcgatcgggagagcagatcttcggaacctgtgccttcgacgtcatgcacaagaagaaggcggtaataaggtttttgggaagcggttcgcacgactgctccctgttcgttcgcgacggctcgtcttcctcttcgctcgcgtgctgcgcgcctttgtcgatgtccgcaaccgtgagtgattcctgccgagcaactggttgttcctcaacctcggtacatgttcaatatgttgcgcatatttgatctgttcatgttttactgcttagtttatatgtgtagatctaatgatgcattaatgctagtatacatctgcaatgtcatgatttatttatggaatatattaaatcattatatgcctatcatctcaacatcgactacggcacaaagagctattatccgtgttgagcaatcttgtcggtttcttctccagtccaagtatctgcgttgctcctttaaaaagactccaacagcggtagtagtgaatctgccaacccacctactcccattttctatttctatgtatcaccctttaacttcttaaatattaataactaataaatcttaaatctaaatggatatccacatataaaattaacgtggatagccacattttaggaaaatgtgggtaatatattgcatggaaaatataatttatttattttataaaaaagtgtgatattttccttttatccgtatcaaagcacgagcattagctagtatttccaaaaatactttagtagtggtcagtttaaggctcttcctacatgcgtctacgcgagtgcggagtagtcgaggtcattgggagcgactctgacgatccaattggtaaggtaaggttccgattgacattgaagtggttgactaagctaaggtttaccacaaccatctcgtttgttgattacaacttactctatccgtccccacttaagcatggttaaattaggtacagttttgaaaactatttttttactttaaatttcttatatactataatgtttgtaacaacaaaatcataatcacataaaagtaaatttaaataataatctaaatttattattttcatcaaataaaatttaattcataatgaaataattattgatcaactatttaaagagtttatgcgtacccatcttagtgagtaggacggagccatggagggtgtattatttggaatatttgtgaacttactaatggatgatggtcaaaatttgaatacaaatagttgaagtactagtgtgtaatgataataaatatagtaaaaaccgaattatttcgtgctaggattttaaacatcgtgtaatcccttctttgtaaaataaatttaactttcatatacgtatattccaatataggatatgtttagattcacgtacagaattttatttttttttccgagacagtggtgttatagaaaaaaaaaagggggggggggggggggcaaaaacacacatatatcttgggtcaaagtgcagtgagaaacatcaagactacatacagatcgcacacgaccggtgcgaaaagagatcgaatcgaaccgaagccgaagtgaggagagcggcgagcccccgtcgccggcgatgggcaagccgacgctgccacccgtcgttgtcgtcgtcgtcctcctcctcctcgtcgtcgtgctgccggcgacgacttgcggggcggacgcgggcggcggaggggaggcggaggagttccagatcccccgggacgggagggtgctggagctggacgacggcaacttcgacgcggcggttcgcgccgccggcctcctcttcgtcgacttctacgcgccatggtgcggccactgcaagcgcctcgcccctcaggtacccctgccctctacctcctccaccgacccatccccctggcccctgccatactatatagctttgctgcgaccgccgccggtgaactgctatgctcgcgctgcaccatggcccccgtcaggctccgtttcccttgttagcaactgcagtgttggtggtgctactcacgatcaagtaggcaaatcggctgggggatttgaggatttttgtttttgtttttaagcagcgagcgagtgattcaaaggtgtgcaggttgacactgccattttgaattcagatgacttgggtgtcatcgcagacatctcaaaacggaagagaaaaattcaactccactctacttgtggtgactctagagttttgccacctaatggattgagcgcgatttttattatgctttgttcatctgtgtgtggatgtctttgcctctttatgaaatggtggataggtgagccgttgcttgtgttgcagttagatgaagctgctccggtgctggctggattgagcacacccatcgtagttgctaaggtgaatgccgacaaatacaaaaagctcggatcaaaatatggagtagagtaaggcaccaccttaaatagagatgtgtggttcactgaacactgaaaagattgagatgcctaatgtttctgcatttctaaatgcagtgggttccccactctgatgctctttgaccacggaaccccaacagagtacactggttcaaggaaggccgatttgctcgttgagaaccttaagaagcttgttgcgcctgatgtttctgttctcgaatcggactcagcgatcaaaagcttcgttgaggatgctggcatgggttttccattgtttctcgggtttggggtggatgaatccttgattgttgagtatggagcgaagtacaagaacagggcctggttttctgtagcaaaggatttctctgaagatatgatggtcttttatgatttcgacaaggtccctgcattggtttctgttaacccaaagtatcgtgagcagagcattttctatggcccttttgatgatggtatgcttgctataatcatttactactcattttttattcatgtactctgagggaaagcctcaataacagtctcattctgctcgatcctcctttttgttctccacttatctagtaatgtaaacatgtagtttacatagtgtagacaccacgttttgtacaaactaacaaacgtggacacatggaatacatcctttttttcaagcttgatgatttgttgctgcatttgttgatgtaggagccttcttggaagattttatacggaattcccttctgcctttagttgtgcccatgaacagagagactgtcaagatgttgaatgatgatgggaggaaagtagttcttatgattttacaggatgatgaatccgatgaaaattccccacggctgataaaagtattgaggtctgcagccagtgcaaaccgtgatctagtgtttggttatgtaggagtcaaccagtgggaggaattcactgagacttttgatgttaagagctcagagctgccaacgatgatagtctgggacaaaaaagaggagtatgaaatagtaagtagatcaattttcacattcctctttcaaaacaaacgcttgtgtttttttcttatgagatgccaaagaatttgcctattttcatttcttaagtttaattcatgtctcatactctcatattgtcatcacattctgtttgaaatgatctcttcatatttactacttactctagcttgaaattcccgtcttgttcatctattcagttttccgcatgactaattggcatgcttcttgttcaaggttgagggttcagaaaggcttgaagaaggtgactatgggtcccagattagccgtttccttgagggatacagggcaggaagaacaataaagaagaaagtgggcgatcgatccccgaccctgcttggtgtgaatgcggtgtacattctcgtctttctggttgctgttcttgttcttctcatgtatttctctgggcaaggcgaggaagatcaacgaccaagacaacgagcccatgaagattgaagatgtacaatagtgtcattcttgaaagattaaaaggtccaatgagttcctgcgtctggtctgcagtagatggctcttgtgactcagagaggggggtagcgcggcagggattcagattgggtgacatagcataggcatgtcacaaggtgacagcgtagatctcagccctccaaaccaaatccaacggctgagattcatccacgtcatcgcgagttaatttaactcataggagtaaaaattttactgggagtaaaatttcaggagttaaaattttactggagttaaattttaactcgtgatgacgtggacgaatctcagccgttggatttggtttggagggctgagagcaaggataatggtgagctaagcaagctatatacttatgtggaagagagagataaagaaaagtagggagtgttgactctcatgcaagagctagctccacacaagctccaagaaataggtattaaattcatagtgagataaagagagaggatgaaaaaataaagccaaccttatagctaacctattatacatgttagctttaacattggcttatagtaagtagtgggctgtactactaaacctgctctgagatctacgctatgtcacactgtggcatgcctatactatgtcatccaatctgaatccgtgcggcagatagaatgttttctgattttcatggcatttatctctggagggtttcatcccagcatctgtcctgatatctaattgtgccacttgtcagttatcaacccctcacattttttttcttattgtgaagagaatagcttatggatattgttttacttccacttccaagttccaacccagaaacaatttcattgaattttgctactagtttcaaggcttggtttattatcttctctgcacttcaaattatctgaatatgtgcatcgtctattattatgttcatgtgtaaaaagaacaattctaaggaaatcgacgacttgctttcgataattttccatcatttttagataatagataatttcattaagtaatgaaattcacaagagtaatatatcgatattaattgagcaacaacagaaagctattgatcccaggtaggacaatcaactgaaacccattgtttgctaacccccaaattgtacatcccaatttcagcaaatctttcacacaaattcaagcgaatttgaagaacagaattccaacaatttcccctacatgcgagtgcaggaggggtcgaagtcgtcgggggcgaccctggcgatccagtcggtgaggctgcgcttgacgtcggcgtggttgacgaaggcgagctcgtacatgctgcacaggttcaccaccaccgtctcgttcaacgccgccgtcgggtggccctccagcgccgcctcgagcaccttgatcgcgtcgccgaggtcgcgcgagtacatgaggcacagcgccttgttgttcacggccaccgcgtccgcggcgtccgcctcgatgcaccgctcgtactcccgcaccgccgccgcgtagtccttggccaccacgcactccagcgcgcggttgcgggcgaggaggctggcgtgggccgggtcgccgccggccaccgactccacgtggcggaacgcggccgcggcagcggcgaggttgccgatctggaggtgggcgtagccgaggcgggagaggaccgccgggttgcccgggtccagcgccgcgacggacgcgaggagcgcgagggcgacgtcgaactcgcggtgggcgaggtggtcggcggcgaggagggacgtgacgagggactcgcggcggcgccactccgggtgggaggcgtcggggcgggcgcggacggaggagaggagggtgtagaggcggtcgagggcgagggggcggtcggcggggaggaagagcgggagcagggcgtggaggaggcggaggaggaagggcggcggcgggcagcccgggtccgggcggagcgaggcgatgagcgccgcggcgtccgcgtagcggcggagcttggcgagcgagagggcggagagcgcggagaggaggaggcggtgccgcgggtgcgacgcgtcgtcgaggtgggagagcagcgacttccactgcccgcgcgtcgccagatcgtagggcacggagaggtcggggaggccgagcgcggcggcggcggcgggcggaggaggaggcgaggcgggggtggagttggacgcggcggcggcggcctccgccatggctggatcgggatctcggaggttggaatcggaggatcagaagaagaagaagaagaagacagaggctggtcgacgaagtgggcttgggttgtacactttgtacacaggtaaggtattattgggcttttgggctgtctcaactctgttcgctaatcatcacaatcacaagtgaataagtagattaaaaaaagaaaaggtgatcccttttctgctattagttgccccaattcaatttaaatctgaaggttagatagtcaatttcatcctcaagtcaaggaaaaaagaccgacggatgtaaactcatcaggagtagtattttcacagtactatcaattaccgggaaaacacgctaaattacggcatagtggttggggtccggtgggaggaaggaaggtcatgggagggtgaaaaccaaacggtgaggtgtcactcagctacaagagatgaagacacgatgatagactggtattttcgcaatggtatcaatgacacaaactttgggtctagtggaaagagagatagtagcctcacaggagggtgaaaggccaatagtgataaacttgaattgttaggaggctaacagtggtagcagcaaaagagggggggtggcaacggaggaaagcttaggatggcatgagtaagaaagggttcgatcgggaagagagacggttagtttttatatctgatgcagcaagtctagtctagttgtccagatttaacacgaaatcaagaatttgacaaataggcattctgatttgctctatattttaatcttttaacatatggtccttttactactccctccgtttcacaatgtaaaactttctagcattacacacgaaatttttttgaaattataccgtttatcgattgattgtgcaaaaatataccggatagcgaacgatttgcggaaataaaccatcggtattgctttttggaagagcgataccgatgttcgctcgttgaaagtgcgatagcgtggcgaaatcgcgatctgacaaagcgatagcgaagttgagctggcgctctcgcgcaagcgagaagcgagaccgcagcgatatcacttttcccacgagcgagagcgccacgtggagaaatccccacgactacctcgggtggagccatcgctctcgcactttcgttgcgcgagaccgaggccggtatcgtaatatgaaaccgcgagaccgattatgacgcaacggggaagacgtgggcacgcggtatcgcgctttgcacgcacgagactgctgacgcggcatgcgcacgagagagaaagactgggggagggcagtgggcccgcggcgtcgcgctttgggagcgcgagaccgaacgtggtgtcgctatacgcgtgcgcgagagcgaggcgagagcgaggagcgcagtgggtcagcgctgtcgcgctttgagggcgcgagaccgcgcggtgtcgcgctttgcgtgcgcgagagcaagtgcatcgagggcacggcagcaggctcggtatcgcggtacgcacgcgcgagaccgccctcggtatcgcgctccacatgcgcgagagcatcgccgcttttcgccaccgctttgcatgcgcgagactgctttttgcacgggttctagccatctaccttagctttttagggagaggtggaagagctctgtgtattctcttatcaggccatttgtaactgctagcgctggaattcaatgcgctcacggggttaaattgagaggagaggagatggtcctcacagaggaagacataagggagtgaactgaggagagaaagagcaagagaagagaggaggcagtgcaggtagtggagagaaggaaaaaaagacacgtaagttgattagttttctattagcacaaattctacgatgaggatttagaaaatattagttcacgtagttaatatttgtttttaattatgtcagagaaaaatttaggtatgtacagctacattatattctgttaggtcgtatgtaaaaatagaaatgtagaaagttaatagagtcgattcgggttaaaaaataggtagacataattaatttataaggtacataagtataatataagttagaattaatttgtacgtagtagtaattataagttataattaattagcagttcatgtgatgtttaattttatatatacggccaatattatatgtaagaaatgaaaaaaactgaaatattaatagttatatttgtagttattgatattgatattaatagtattaataattattaaatgtggtacaaaaattaaattaaagttgtaattaatttgtagtaattttaagttacaattacttagtagttcatgcatttatttattttgtaagaaatggaaaaggtataaatattcgttaagtagcgggaaatatatggtgtacttaaacacgagctttacattgtaggttgttacaacgaacaaagaaatgcagtactacgaagaactttgaaattgggacttttatatgagcaaattggttgaaaagaagaaggcaagacaaggtatggtactataatggaagacagtttgcaattaatagatagtttgtaatttatttggtattgtaattaaagtgcagttaaataaatttatgtcgctgcaaatagttttatactataataaattggtagttatgattaatttgattatgtaattaatcaagtgaagttaaacttagttctattaatttatcatgttatgataaatttatagataattttgtactaactgataattacaaatattttgtatttaagtaaagttacggtccgttagataatttatagttaaagtagtaatatattaaatgtactcatccaaatttgcaatagtagtattgtttcggaggtcatatctaagtaggtacaaatagtccgtagcaaagaacatgatgcagctcaatgagtgtcattgtcttagataaagaatataaagagctaaccaaaatgatttttaacttagcttccgtcaatgtttcttcggtgcaagtagtcatttgttgtattaaaattaattgatatgtataattaatttgttagttaaacttatggattatgcagtgaactaaactttgagacagcaattgttatacgagcaagctggttaaaaaggagtaggcggtgtctcataaacgcaggtaaatatttcgtcatcatatttatgtacgatatggtatggttgtgttgttttaagtattacgtactcttttacttaaattaactgccatagttatgtttaattacgtgttttaattaattaatatgtattaattttattgtcatgtgtatattttttatgtaagttgtagtaaaattataaataatgaattgcattgtcatgtattcgtaagtaaataatttatgtttacgtaattatttatttgtaaattttttattacaagtacatgattttatttataaataatatggaaatataaataagtagttattgataaagaattttttaacaaaaaaaatagtatgcgtgtaaacgaattttggtcgcgaataggacacgtttgttctgtaagacttccttacggactagtccgtgttgtctgcaatggcaggaatgtcggcatttagagtgtacttcggtgaaggtgaaattatggaaaatgaaagtggtgtcgatctgagcaactttaggcgatgcacactataccatccaaatcctgacactcttaccatgcccgaagtttggtactggctaacatgcacattttctttagatccgggtatatatagtgttaacgtgagggttatgtggagccgatcggccaacaacataagatgggagttaaaaaatgtgacacggagtaaggctggtaggattggctcgctggctgtaggagacagggatatgaatatgtcatgctggtgcaagcatgtcaaggaagagtccccacgaagaacgcagcggggcaatccagcaactgtgaggagttggggtctagttcacacgaagaagatgaagttgtagctccccatcgtggtggcgatgttggtcctgacattcaaaatctatccatacaaggagatgaagtggtcaaccgccatcatactgatgaagccgatgaaggggaggacatacctgctatagttgaagaaattgagagggtggaccgacatgcagtcgaagatgaggaaaacctcgctgctaaagagaatgatgacgaagatgaacaagaagttgaggaagtacctatgcctgcttcgttgaaccttgaagaccctggttatattgcagaaaactcttgtcatgattcaatatggttctacgggaatggccaaatcaatctgggtgcaatgttccgtgacaaaacggggttgcaagacgcagtgtagtcatggtcattccagatgcaaaggcagttcagggttgtgaagtctaacaagactaagtacatggtcgtctgtgagacggaaggttgcaccttccgtcttcatggtcacgtgccaaagtacgagtcttaccggattgtgtccaaactgcaggaacactcctgtctgattcgggacactagggagtcgcaccgcaacctgatcgcggcatacgtcgcgaacaagtactacaatgaaattattgaaggtgatgacctgcctgtgcagcacataataaaactggtggagaaaggtgaacaatacacaattagttaccacaaggcttggagagcgaagcagaaggccatggagaaaagatatgggacatttgaggaagcatatgacactctgccacagatgcttaacattctaaagagcaggaaccctgggaccaatgttgctgtccaggatcgggagtcaattcgtcctccaaattatcttgtgatgcaacgggcattctttgcattcggagcatgcattcatgtgttccagtgctcgaggctggtgctgtgtgtcgacggtactttcctaaatgggaagtaccgaggccagatatcaacagctgttggtgcggatgcgaacaaccagataattctagtagcttttgcttttgttgaaagcgagaactatgaaagctggttgtggttcttgcaacttctaaagtggggagtggtgcaaaaacgcacatcgatatgcatcatccataaccggaatgccggtctgttgaaggcaatcaaagagctccaggaggatggtgatggtgcatactactagcttgacatgcacagccgttggtgcatgcggcacatgggagccaattttttcaaacaattcaacagccggcggctgatgaacatgttcaagcagttgtgcaaggcaaatcagtctacaaagttcgatgagctttggaaacaacttgaccaggcgacaaggacacatatccggtcaaagcagaccaacaacaacccgcaggatgtacatgtcccccaggccctggaaccaatggatgatcttattccatcaaatggaaagaagtgtaggtcatcaaagaatatcaaatgttttacccattggattgagtgcgagccgaatgataagtgggcactcctgcatgacactaatggggctaggcatggcataatgaccactaatcttgcagaggcgtacaatgcggttcttcgcaaattaaggcctttacctctgactgctattgttgaaggcattatgcataggacaacgatgtggatgaagacgaggcgggccgcggcgttgcaacaaatgtctaacgcacaaacacctttctgcaaaaagatggcagagtacctccaagagaaggctaacaaggcaagatttcacacggtcattaccactgggaacgtcagacgaaggtgggaagtcacatgtcgcactaaggggggttttggatcttctactggggtcatcactcatgaagttactctagggcacgaatctgataacacatgttcgtgctcttgcaataagccaaagcttcttcataagccatgtagccatgtcctagccacatgcgataaaattaagcttgattcaacatcatacgtgtcgacgttctacctaaaggatagagttctgaatgcatggagtgctgagatcctcgggtggaggtccctccaacacctaggcgaaactgggggtgataaaaggatctatgtgccagacttgaatttgttgaaggctggtaagggtagaaaacaaacacggtgcttaagaaatgatatggatgcatccgaagtgggagggcctgtgaggcgatgtgaggactgtcttcagtacgggcaccgcactagagattgcaagaataacaaggagggtgcatcttcaagcatggaacctaggcaacaacgtgcgaggaagaatagaaggggctctcagggtgctcacgatagggaggaaggaaacctgcagtagttataatctacactgtccggttatttatgttcggtcatgatatgtttgctgcatgacgttgtatttcaataagtttataatatgttagtcaataagcatgtgtaatatttattttattatggtaatgttgtaatattttattgtaaggtgttaccaagtttgtaacgtttgtaaacctattgttgtactatttatttcaatgatactggtcgagtttgtacttgtactatgagaaaatttgtttccttaatttaatgcattatgtactttttcgtatgtgcacttgatgaaatttctagtttacccttcaggatgtacatgcagatatggaagatgagtggccttacccgttgcttagcaaagagatcgatgcacgacatcgtgcaaagaagatatctgatggaaattcttgctctagtctagctgtcctgataccgcgtacagccggatggtgggggattgatccacgatggaagccgaggtgcataaatggttaaagtttgcaacatcatgatatcgtactataacattgcctaatgtgactaataaatttcctcataggttgtcagctgcagatcttcttaccttcgttcagataatgcaggcaaggatgcattacgacgctagagaacctaaacaaaaacaaatgggggcacatagcaaacgatgacaaaatatcgacaagtccctacttatggcaatggttgataggtggaggccagagacacatacattccatctaccgtgcggagaaatgaccataactttgcaggatgtgtccatgctcacagggctgccactagccagccaggcaattgtacttccggaccctccggaagattggagagatgatattgtatcacggtatgcctgtattttgccacggtacgctaccggtgatacagacgatgatgaggacaaaatatttttctctgaaaaagaaactcatggccccacattgaagtggttgtcacagtttgaggtaattgaatatttttaattaaggcatatttcgttcacattcacatatctgacaacacattgtttttttgttaggtgcgatatatgcccgacgatgtccaggagtaccaactgacgttgtaccttgaggcttatctactttggctgtttggttgggtcatgttcaccggctcgcacgggaacactgtggacgccaggctaatcccccttgctcgccaaattactgaaggtaatatagcgccttctgcacagtttagctggggatcagccgtccttgccgccacatatcgtggattctgcgacgcttgtattaagaccggacaaagggaggcaattttcacgaggtgtccacttttggtcatgttgtggtcgtacgagcgcttctcgttcgaacgtccatacatgagcgtggccgtggcccacaaggacgattacactgacgcagttgatgatcgtcctaccttcggtactcgctggtgctacggactggtacgcatgcttgcattaaaggaatatttctgtcatttcaatgaaattgcataactaaatctacaatctctgatcgtgcagccatagtgggcgagaatccaggtgcacaatgtgtacgagtactttaccgaggcgttcgaaagccttagggaaaacaaagttcggtggactccgtacacgaacgaagaggccattttgcgtgcaccacatggagtaagcatcttatgctaccgcgatgaaccgtactggatgacacaaaaaatgctggtgtacgacatattcgtcgaggggtataatgttcaagggtaatgcgtcagatgggactgtaccaacaagtcccaattcctgttggacttcaccttccaccagatgtgcacatgtatgttgttatttcaatcctgtctaatttctgtgcactaaaaattgtcagatataactaacaactaattgttatatttttgttgcaggcaaaagaggcaagctgacagcaagtatcatcgatctatgcactcaaggatgaccccatggatagaggcatggtcacaggccttgaatgatgtcgtccaggagaccagggcatacgaccacaacaattacgaactatacatggcctggtactcatcgcagactcgcatccggctgcttgcacccaaggatcccgacaagcgaggtccaccaacaattgatcaaatatatgatatgcagctagcaccctccactcacttgacgatactactaccatttaaatatttcgttgcatcggtgtgtccttatacatggggttccactttctaacattgttgctacgctccatgcagaccgacattgcaggggaattaaaaagggatgcgaaaacattgtggaagaagcttagagatggaatggcgggtaccaaccaggaagttatggccgcggttgactccctccgtcgaaaaggaaagcgaatcatgcggctcgcatcgtgccgacattcctcggacgtctatactccggcaacatcaagaaggacgttcgagacaatgccggagcgtccctctacctcttcccggccgtccacctcagcccgcccttcagcctccgcgcgacgatccagtgatggttgtgcaggagtaaggtcaacttcgtttcgtgagccacacctattccgactatcccagaaatcgctgaaatttcggaacgcctaggaggctttggtacaactcaaggtaaaatacgttattgcagaatgctaaaataaatgtcatttatattaaagactaatttattttttcgcagcacaaccggaacaggtacccccacatagctctacgcccatcacctctcaatggcagggtgggtttgcgtcgtttactggtacgggatagctcatcattatgctaattttttccccaattgtttatgtgaaattactaaatgatgttttccaattgatgacagagggaacgtgaatggtctgtcccgtgcctcatatgcctcctgcaaggccacaaatgattcctcaaatggctcccgatgtgccaacctcacactggcaaggaggatttgcaccttttgcaggtccgtgtacattcagtaccatattggcatgcatatgtccactcgtaattttacttttgttaattaattgcacatacagggactagccaaggtatccctaccataccccaattgtctgcagattttatcggtcaaggagggtttacgtcgttaggcggtcagtctccccttactctaatttcatatttttattattttaatttattaaattttcatgtatatgaatcttattgactatttacttcctgatattaacagggcctactcagtcggttccactgcatccacctacatatggcaccaactcatggcaaggacaatccatggattacgatggtacacacagccatcattctccatacacatatatcgatggcactttcataccttacatgactcccacttcaacttaagacaataactccgtgacattttatatggatgcaaagcacgtcgtttgatggtggagtacagggttatatggacttgttgcaacaaggtgattggctatttggtcaatattcctcgcatcctaatgaaattccatatatgcaagcaccgtcaacaggtttggattttttttatgttattgttgtttgctccagctttgataatttctttgatatctacattgcttctgtagggtcatttcgccctgaaccaatgtcagggtttaggccttacactgcatcgtacggcgacatgtccagcttcggtggagggtcgtcaccggtacccaatgagcctcagacttcacaaactgatgatgcgccccctgtgacataggccacacaaccagaggttggcgaaggaaatgacaatgacccgcgtagatctaaccgtgagcgccatgagccaaaccgtatgtcactctcaggccctcgacatgccgcaggacaaaggaaaaaaactacaaaaaagcgaggtgaaacatctaggactacgactgaccatgacgatgatgacgagtagaactgaacattatgtctttcagttcactggcaaccctatctgaaccttgctgtgattttggcttattcttcatgttatttgtactgcaatgaacattatttatttgtactgcttattcttcatgttatgtacgatgtttcgtagttcataaatatctcacatttttatgccctattttgtagctagttaacacatatgatttttggttagctattaatttttcgtacgagagctaacaaaaataatagtctcacaaactaaattaatagtgcagtttcaatgttactcgtgtggttaaaattgcatattacttttactttttactactatgacttaaattgcccactaatttcttttcacagagatgcaatgatacgcacctataatggcatcctctctttccaatcacgggacatgcgccagagcatcaaatcatacacaattaaactttcaagattccgctgcgctatgccgaaagtgacttcgtcgctttgtaattaataaagcaaacagttatgcagcatgtgctgccaaaagtgacggtgtcgctttgcaattattgtcatcacgagtgaaacaatctggcgctattgaattgattagtgaagcagtccgacgcgccgtcgtctctttctaataattgaaactgtgcagcttcttgccatcccctatgaataacaaccaaaactagcacacaactacatctcttcttcataaacgttctgctggttctaacttcgtcttgcatattcttaggcccgatcttgaggcaggaactgagtagttcgtgaactcgctctatgttgttcgttcacccactattcggttcctgtcccaagatcgagtctgtgaatatacaaatatgatttttttactacattcttacacccactctttttttcaagttctagcatccgtttgtgaatatgacctactcctgcaaattcataaactcggtgttgcatattcttagacccgatcttgtagcaagaactgagtagttcgttaactcgctacgcggttcttgtcacaagaccgagcctgtgaatatgcaaaggtggttttctctgtgaatatgacatattctaaattcctattctttattaactttgtaaaaattgctcccgaatgatctctctactcctttatatattcttaataaatatatattcaatttctatttttctataggtaatatattgtttctttctctgatatcattattttgcaaattccaagatatttatctttcttctcgtagccgcgtacacaatctttgcctattttcaatataaacttgtttctcatgttcatttatgtatatatatgttgcacacataataaaaaaattatgaaaaaaaattatcctttctactccctccatcctgaaaaaacgaatctagtactacgctggtttttttaggacggagggaaaaaaatatactttttactttttcactccaaaaaaaaacaaagctagtactagtttggttttttatgggacggagggagtacgtaccaacggtgacatgaaatattagcgatttgcaaaacgtaattagctaatcgctcttgcgcacggggagagcgatatcgcttgcggtctcgctctttcaaaaagcgagaccgaagccgtccctgtcgcactgccacctcccaggattagcagatggattaggggcgtggaccacgcgtcaacagtatcgcgctttcaatgagcgataccgccggcgctctcgcatgagaccgactcgctctcgctaaacggtagcgcgagaccgctccggtcattcctcggaccccacaggcgtcagtcggcccatgctgctatggtctcgcgcagcccgaccgcgataccgcacgcgctatcgcgcactcgaagcgcgagaccgcttcgtgtcccgcgtgcgtcaggcggcatcatacagaccgcgctattgctttacaaaagcgcgacaccacctcgttctcgcgctttaggaccgcgagaccgatgcattagcgctccctcactcccaattagcgatagcccgccgcttttgcgcacgcattacgcgatatcgcgctatcgctgtttcaaaccgctacgccggtatatttccgcaaatccgcccttaatcagcttaatcttgcaattccggtcaagaacacgattaatttcaaaaaattttccattacacacatacatataaatgttaataatctaaacgcatacatatgtctagattcattatcatttaaataaatatgggcaatgctagaaagtcttacattgtgaaacgaaagtagtatctattcagagaaaaaccaagaaatattattgacaaacacctaaatctaagaaatatcatcgacaaagtgtgaataccataaaataccatcgtacaagcgatttatcctagaaagtcatcaccgttaagatttcatccatcaccgttaaatgcagtatttatctcatagcacttgatggagagctacgatcgaaatcctaacggatttctataacaacaaagtcaattgcacgatgtatctcataaaacccgtacttgttaatgttatttctggaatttgaactcttattatcaatagcattttttggattttctcattaagagatggctcagttaaggatagcgtaagcaaagaaaatgtaatgagcagagaaactttgcaactttcgaagataaagtcgttgagataactccaaatgaattattatcacttgcttgcacaaactagcaagcatgttccaacaatgtctcaagaacccaagatactgtgatatccaaccaggggaccagggaaaagcttttgccaagatctttccttgaacacaagtacaacttcaattttgtaagagaacgaaaagaggaagaaacatacaaggcacacagtttgtatgacttgcccttctcaggcagcaagttaacgaaccctctggataggaggcactgcagaaaaatgagcttttattattcgttagagtagcacttctctccatcaaaagaccaggaaactggaatcagctttaagatttttgacccaaagcaggaatcttcttacaagcagggattgaaaccaaaacacccatttccgcaattgcttctttttagctaagaaatgggctgacatattgtacaaccgggaaatccagatgaaacaaacctttccggttcgaaaagtcaaacggagggatgagcagagaagagctaccaaaagaatttttgttcccaaactgactttgcttccctaaaaattttcgtcgacatcttagtttgtccatgaggcagacctcttcaaaacaggcttcattgccttatcctcctctagtgatatcattccgagatgagaagggtcctcaagcatcatcttggcgaccaaataccctgcgatagaccaagtctggaatttccttgcctgcttgccgacataccgcccaagcttcccatcatagtactctggccaaccatccttcaacagccttctctcagctaagtcaattgcacgccttgcaatttgtggccggccagtcttgatgcaggctgctgtgagcagccatagtagtactgcagaaagaatgggaaaaattgtgttaaagttataacatgttgaagttactcaatgtcatgctatccgtttgtagtacaaataacacagaaaatcagaagagatataatgtgatgttatatgtttatacgtaggtttcatgggcacatgtaccgtgactccgtgaggaaaaaagagaaggcatcaaatttaataaacattgctcttctcagcacataaaaatttcatttaaggccatagctcataaacagaaatcttgggcacaaatgtatatggtccttcactaatcaccgaaagatggtatatggttatcaattggtttaattcagcgtccaaatcacataatgataaaagggaagcatgataacatttttgcgactaaaaactgtaatatttaagagagatttaaataataagaaaaccttctaacctggccaagatcctccattgtggtaactccatctagtattcttcggatcacagcctgtcacaatacgccattcgtgattctcaatagcagggtagcatatcttcagaggcatttcaccaataagctcttcccatcgctcctcaatgagatccattatggccgttgattgctcaggtgtagcaagggatgatagtatagcaatcatgtttccaagtgcaaaccaccggaagtccatccttgcaggactaacattaccaatgaaaaaaccaccctggcaaggcataaaatcaaataaccaatccggaatagaatctgggatgacattgaatttgttgacagcagtgtgggaatattcctctgtcttatagcgataaatatcatttagctgctggaaatcaagccaatagtaactccgcatgtgataacttagagcgtgaagacgagttgcaatcctctctacaaactctttcccttcgttatcatgcttaagcaattgaagagcacaccttagtgccataaagaacagggcttgaatctcaatagggtacccataaacaccctacaacaaagatcaacaacaggagtgagcaaaaggaagcttagccataggccattttgatttaagtaagcattacagcccatgagctcatcagttactcataaagacataagacatatcagaagcatatgtgaaaagtcagaaacaaatgttcacaagtaaacagatctatcagcgatttccataattctaatttctattctacacttctgtgtaaccaaaatagcatctggaacttcatataacaagaaaggggacagttatcaggactgagtagagtgttgcatgtccacgtattagggcatggacccatacaaatggtaaaagcaggatccagcagatgaagcaagcagaaggctacatgcctatatgatattctccactcattagcaaatgtaggttcaaatatagtaatggcatttgaaatctaaaccgcgcccacaagaacgaactgagagccctgtcccagttataaaatagtgctgccaatgtgcaatatattaactgtatgaagatgaagaatcattcaaaccacaagaaagttatcgtatgaagaatcaaatatgttgcaggcagatcacagaaatcaagcaaattgtcatgaaattactgaaatctcacataatttaaccaataccaatgtaaaattaaatctacagcgtcatgacttttggtacaaatggtaaattatccaaaagtttattagtgatgttactgtcagcaaaaatcagaccagatgcttccgttataatagaaatgttaattatagtttatacacttgtgagtttgaaacatgtttttataaaaaaaaaaaacttgagcgccacagtaaagtttaccattctgcgatctatcatgcagcaaccgtctgcacacagcaatgttgggaaggtatcaaacccctcagacaagcacaggctcagtatcagcctcattcccttctggcattccggcgtctccgcgagcgtgagatccccggtggacttggtgtatgcccgtagaagtatgatccaccagaaccccgaatccacgggagccaccctgccaatggcgctctccccgaaatccgcatgcagggtgtcgacgcccttcttggagtcatggagcactttgaagctggccggcatggcgccctccccgagcttgaaccgatcgaccttcttctcccagccctgcagcaggagcgtcttgagcaggaagtgcctcacgatctccggctcgccgttcatcaggaacgccagcgcgctcggcacgaaatccctcacgaacacctgcgagcaaagcaaagcaaagcaaaagctccccagatgagacaagccatgcggtttccagatgagctgaatccgcacaatccgaaagcgccgccgccgcgaatagctaaccaacctggtcgtagttgaggacctcctcggaggcgtggtcgaaggcggcgatggtgccgaggggctggccgcggaagaagacgagcgagcggcggagcgcctcccaggcgtcgccgacgatggggtggggctcgaaggagtggagcgcggaggaggccggggtgccgacgagcgaccgcaggccaccccccggcgagtacatgccgtcgaagccgcccctggtgccgccgtggccgccgccggagtaggagacgtcgctgagcgagcggtcgtcgaacgagcgctgccgctcgacgttgatccgcggcttgttcagcagccgcgacaggtcgaagtcgtccgactccgacagcgacgtgtgcgacgccgacctccgcatcccgcccgctcccaccgccagctccatgcccctccgctttgcttgcttgcttcccctccctcccctcctcgccgcggatctccgccgcctcccgcccagatctacgcggatcgccggaggggagggagggagagacgcagcgagagatctaggcggcggcggcggcggtgaccacaaggccacgcgaatctcgatggggagaaaaaaaaaatctagctgcctcgagctcccctactatatatcgccggcggtgcgggattccggcgggggtccgtacacccggggtgtatgacgggtggggccgggggagtggggcccacacgtcggtggggggtaggcgaggagggttttttttttgttaattcggggggaggcgaagcgggcgcggaggtggtgtgcttgggtttcgctttttatttatcgcgaatacgggagcacgtggggttggtggcgggtggggcccggggattcggggaaggttggaggaagaggaggggggaggacgaggcgctgacgtggagggctcaacagcggatgggtttggtcgccgccggaaggggatggttggacggcgacggcggatgaccggcggcgagagtgtccggcgattttggggaggcggaggagggcagcgggggcagccgtggaagggtgttcgtaggctggccggtcctctcttggtaatcaatttcaatcgtagcatacgatagcgagacccgtgtgatagggaaattagtgattattatacggctttctagtagcactgtgtatcttggacttctgtacaaatatattctagtttattctagcaagactatatatctcaaacttctgcaccaatatattctggtttgtttagttgctactattttgtgtcatcaatgtttgaagaaagtacagtaggttggtttaacacttcacttctgactaattataatcgataggaatcgaacaataataatacaacttctaaagagggctggtatatttaacccaaatgagttctctggatatgtacttgtataatctatgcaaatagagtattcgtatttggctgcttggtgcagccaacatagccacaataattgaaaaaagaacaccatatgagttggtcatattgggctctagtcgtagtccgtatgtagtcgaatatacttcgtattaattatactgtagtacaaaacattttgatttctctttatcaattagtgtaaaatagtgatacttgtatctctttttatgaaaggtactgcagttgactattatcatattgtgtgcgaattacaaattactccgactgaggatagaaaaaaaaattatatggattgaagatgaacatactataaaacattatcgtgtgacatgttatatatattaatatcatataactagtggcatatggatccgccagttataatattatgagatttctttagatcatcttctgtactcttcccttttaagtgaagataatactccatccgtttcaatatatttgacaccgttgactttttagcacatgtttgaccgttcgtcttattaaaaaaatttgtgaaatatgtaaaactatgtgtgtacatgaaagtatatttaataatgaatcaaatgatatgaaaaaaataaataattacttaattttttttaataaaacgaatggtcaaatatgtacttaaacattttgaaacggagggagtaattatcttttccccaaattgatgcatgatttcagctgttcaaagcgctataatcgataaagtaataaagcatgcttagaacgacgccaacttgcctaaataatgcatcgcaaatgacatttaaaaagtgaaagaaaaaactaacaagaaaaaaaagagatcgaggacctataaacagcccactaacttaaaatgctacagtaaatgatatgccgtcatgcatgacgcacagcaaacacgagcttagaggagacttacacaaacaaataatctacttatttttacaagattatttgttctatatcggaatcatcaattaccaataagacacaaggaacacgagatggcaaacgaggcaatatttatcgatcaggctggacaaaacaaaaagggacaacgtttagtgtttccacggtcgagcttgttttggtgtttcgttcatcgtgttgattgctgaaaactaatagtcatttcaattttgtcatattgcctgcatttttctcgaggggtcttggtgagtacaaatcagagatggccccgctctgatcctgttaccgttaacaccgctttcttgcaccattccatgtcggatatatagtgtcattggaagtatatacgcgtactgtcctggatatccgacacccagccagcaaaagggattgattaccatgttgtggcacaaaaatgcaggttaaagtaaaacaatgcatcctgctgtttgttggatgagatgctgctcccagttattaatcaccctcttgctctctctggactttggctatgtcgcttgttgcacctcaacgcccccgtgtcctgcatgataatgttattttggccacttggccaacaaggatacacttaacagttggttctatacaattgagaatgtatagctatacaattcagaaaaaaaaatattaaaaattgattcttacacttaatagttgtttctcaccaacttgacatctcctaaatactccaactattttatattataagtcattttgattttttttaattaattatttttaagtttgatcaaatttatagaaaaatatagcaatattttttaataaaaatatattaaatgttagttttaataaaattaatttggtgttatagatgttgctaattttctctatagatttgattaaattaaagattaagaaaaagttaaaacgatttatagcaaaaacggagatagtatgacttaaatatggtttctcaaaacatttttgtgtacatgcacacttgaccttacgcggtggccaagagcggacgagcccaaagattttcgacgggacctagcttgatgcagttaggccatttgggtgaaaaaagaaaaggctaatccagttaataggccatttcggtggaaaaaaagaagaggctcatcagcatcacgaggagacacaaactagctttaccgccgtaatcaaggggagcccctttttttctttttactttttttattttccttttattctactcctagtagagtagtacgtgtacacgtgcagagcacacgttgacgatctccagcgctcgtgagtcggggcctggcactggcaggccgtacacggcggcacgaggcccagtgggcagcgggtgggccccgccgacgtggaaggggcagccgagatggagagcggagtcggctggtggtggtgggtcggttggctggtgggtgggtttgggtgcgacccgaccggacggcgatcacgcgcgcgggacacgctacttccgttccgtttcgtgtccacacgccaaaaccaaaaagtaccctataacccaccgcaccgcacgtgaagcctcgcccaacggtcaagcctctgccctgacacctcgggcccacctccaatagatagtactccgtacgaaaaacttctggtagctgctgacaccttgggcccaccttcaaaagatatttgtagtgatacttactccctagaacctactttattcttcctatactgaccatttgtcttattaaaaaaactaaaattattatttattttacatgggaaatgctgtgtgtcgggcgctcgagcgtccgaaccacgtgctgagtattttaaatagctttaaaacgatttttctcataaactaattattcaatctacaatccgatcacgctgttgtattcgttgtaattaaatctttataacaagaccacacatgattatatttcgacaaaaaatattttagcttttttaatgatattttttaaaaatgctgcatatggttcttttagatgtttcaaccagtagttttacgatgtttcagctagtgtactcgtgatatttcactatatacggatcaaatgttgcattggatttagatattatagaacgcgtcgttacaacaaatcactcacatattttggagatcctctattaaggaaatttatttctttttttgttccaccaaaaatgtttcacctagtgtactcacaatgtttcactatatatagatctaatgttgcagtgaactaaaacattctattgcaacaaaaaatctacttattttggaaactccctattaagggaatttgttttattttttgttccaccgaaaaatatttcacctagtgtacttataatgtttcactatgtatggatcaaatgttgcagtgaactgaaacattctttcgctatttgctgaacacccgatttaaacgagtgaaatattttcgatctacttagtacaacaatttcgatatacctggtggaacatcgtgtaacatttaaaaataattcaataattaggtaaaaaatttcgtcggaatatatcgatgtgtggtcttgttttgaagatttaattgcaacgaatttaatggtacaatcggatcataatttggataagtaatttaagagaaaaatcagtttaaagtaagtttgcacgtaaatcgggcgctgacgtcatgccgacggcgaggagtcgtgtccttatttgtgacttactttattatccaaagtactttaagcataacttttcattttttatatttgcacaaattttttaaataagacgagtgatcaaacagtataaggaaaaggaaaaagtcaaaatcacttatattatggaacggaacggagggagtacctccctggctctactcttgtttgtgataattaaaatttatggataatccgaatttgatatagttattttagattacaaaagaattaaccactatgaagttgaaaatttactctaaaaaatatttaagaaaaaaatatataccatatttttacgtggaaaacataaaatgacgaataatctgatttttttagtaatttaagggtataaaagaattaactactataaagtttttatatagaaaagttttatacaaaacacatctttagaattcaaggattttttttaatagcaaacaaaaaatccaggagaataagaaaagatccgtaatactcatattggtatatactttaaacaatttttttattgaagctcacatatattggtatattttaaacatatatatattatatagctatattttagattttagaacggatggaatattttttactggagtgcaactgcaaagcacaggtgagcactggcccggcacagcgacctgccaacggcggcagccttccccttccccattttcagacacacaccgactcgctctctagccacagcgaatctctctcatcccatctcatctgatccgatcactgcagctgccatggatgaggaggctggggctaacctgtcagaggccatgtgctgcagctggcaggtgggccaccaccccatccctctgctgatactcggttgctttcaagcctgtgcaaaacataattaatgctaactctctggttgaagagagttattgcaaatgaacagctacgtcattgcaacgtgtaaaaaaaatatgagagatatactcctcatgttggcaaatctctcacaccaaacaaacaagcacgtgggttggtggcttcaagtcaaggccagataagcagatctgagaagggaaccttgacggtgaaataaagcggatatttgtccataagaaatggagcatgcttagaatgtggagtccctacactttaaagtcaatataaatttataagatgcacttatgttcgattataacgtatctttcacatgatccttccccatatcagagcttgttctacaaagccgaattgcccttctttactccctccgaatcaaattatagaccatcctctttttaagaaaaagtaaactcggtaacttttaactaataatcatacttgatatacattatgaatgttatatcattagtttcatattttaaagtactatatcaagtgatgctaatttcatatattcgttgaaaacatatcatgaaatatattaatggttaaaatatcttcctgaatactgcgtaaaataatactccctccgtttttaaatatttgacgctgttgacttttttaaatatgtttgactgtttgtcttattcaaaaaatttaagtaattattaattcttttcctatcatttgatttattgttaaatatacttttatgtatacgtatagttttacatatttcacaaaagtttttgaataagatgaacagtcaaacatatgctaaaaagtcaacggtgtcaaatatttagaaacagagagagtatagacttggacagagggagtatctcaaaaaaaaaatatagacttggagtatttcagagcttgttttataaaccgaattgcaccaagggtccaaggcaaattgctggcacaaccatatccgtatgggctaggctgtgttttttttcaatttttttctataaaaaaattacttcaaaaatcatattaatttatttttcaagtttttattataatacttaattaatcggacactaaaccatctcttcatttcacggcccggagggaaggttcccaatcctccctattcaacgcagcaccatccaaacaaagaccgaagctgaagtttttctgacaaagtattgacgtatgggcaatgatataatgttgcgatagcctgcaaagacaaatggtagaatttgccttgaaaattaactaggatccatttctggaaaatgggcgttctacagcttgtacaaaacttttcaatttttgcggctagcattcgtcacaacgaaggcgcacaattacacaaaacatcagaagaagaaactcaactcatggtgctatggtgaagggatcttttcagtcaggaaagcttggctaggtgttacagagatgttcagacattgactgcagaaacaatcaacatcataacaaatggtggtagtgaaggcttccacaaaaaaatagaggaactaaaaatgatagaaaccttccacgttgatttgaatctcatgaaaatacatcgtgctgtataatctagcatgtacaccatcaagagaacaacggaattttgccaaccatgcccacaaacattgcgctatctaacactgctgcaattagatgaaataaaaatagtcagtaccaatatgttaaaaagaaggtatttatacaaagcaggaacaactaaaaactcttacctgacaggcctataagttacatgaaatttaactcttgctgtgttgttttttctttattttgtgttttggcttgacagcgtcttttagactctttggcgatatagcttcctgcgtctcatctgaccctccagcagtcaaccttgattcactttgcggctcaggattacattcagataacattggttcaacatcctcctgcttgttgtcctcaaccacagatggtggttctgcatattgcaatgtaacttatcagatgtccgcatattgatattgcaagataaattatcagaaggatgggcatgcataatgatatttaagaatcatttgtgtcccatctaagataacagaagttctccctaaatttatcacagataaaaagcaatctgtactttatatcagacatgactagttgatagcttgatattggaggactggcaggaggaagaatatctattgtcccatctaaaatattgtaatgccatatagattatagcttcactcagccaaaacctgaactctctgtactatgatgctctaaggtagaaacattatagagatatggggaaattcatacatgtttaacacatgctcatgcactggctatcataatcagaaatagaataacaggtaaacaatattaacagtaccaggcaattgagaaattctgagggagcttaatgaaactcctttagagtatggatccctacattgcaagaaaatcagaacaggttggcaaaacttcaatgtagatttacaaacaagtacaatgctccaataactaccaatttgatggaccaccaatgaatttggatgtttgtttttgtttagcagttctgtccacagtcaaggatgaattccgttttatatttcgatgatcctcatcatcacctttgtttatctgctgaccatcgctggatggttttgtactttgagtttccaatgcaccatcagaactttccttcatagccacatcaggagcattatcctttttcagtgctgaggctggcaaacgctttactttctgcagtgccttcgcagaggtgtatgagttaacctgaacaaagagatgcttaggatgaaatgcaaacccaaatcaatgaaatacaatggatggtgagaagccaagtattttcacagttcatagaacatcaaagcaggcatataaattgcaacatcgtatgtttcctcacagacctcattctttattttgcttgttatatcagcagctttaactgaagcaattcttaaacactgcatgataacacttgacatgacaccctctccaccagctttctggatggaacatacatcaccgtttgagttaattgtagcagtcattcgtcctcccataacagcttcttccttatatgtcggatcaataacctaaacatgaaattcaattaaaaagttgtggataaaaagaccagaacatgatggacatcaataatacaccctggcatttttagaaatatattggaacataccatgatgttgccctcgccaaaatatgcaaatgtcacagcaatagggagatgatgaattgtcaaagggagtgggtcccttacctgtaaaatacttaaaactattcaatagatcaaatagggcataagataacttatgtgtaagcgcaaacaaagtaactagcatagtagcatatgacattttaacgaggatatgtttcaacaacactacaagaagctacagacaccatataaagtagctagtcccgcttacactgatgagtgctgaaacaaactaggaaatgccattccttattggtgaactttgaactaggaaatcatgtttcagttacacactacaagaagctacagatgcccaaattaactactcctgacatcgatgaaacataataggaaatgtcattccttatcattgaactttgaactctgggaaatacgtttgcaagacaatactagcttacctcagggtcatgtactgtaacctgttgaccatcttcccctccgaccgtacattcaggcctccggaaagtagacagagctgccagcgcggcaatgttagctgcatcaatgagattcctgagggataaaaccattgcatcgggcacatttagctctcttagccagaaacatcacaaatcagtcatgtcacaaggcaacgtatatctcataccctccattatccaagatatgaaggtcgacgcgcaccgaccaaacatgcttcccagcaacaacacacagggactccatatcgacggctcggctctccctgagaatcaccaaaaaggtgctcatcagactacacgctcactgagctcttcggcaaaatataccaaacagcaatctcaggggggagaccaccttaggccgcgatcgacgacgcgaccgagctcgatcgccgactcccctggccgccccggctcgaaggcggggtcggccatgggcgagaactcggtgaatatcgcgagcgtcccctcgttgggcctgtccttgtacggctgcaccagctgcgccgtggcgtagcccatgacgcgcgtgtccccgagctgcacctccgccgagccgtcctccctgcacacgcacacacacactccaggagcttcagagaaacgaaacccccagcgaaacgccatggaaggaggaggaggagggggacgcaaggaaggcgacctgccgaagaggatcttgaggcggcggaagtcgaaggggcggcggccgtcgacgcggaggtcggactggagggcgcgctcgatgaactcgcgctcgttcaccgtggggtgccaccgctggtggtggtccatggcgttcgccgttcgcgtcgctcgccggcggcgggggtggtggctagggttttagcggccgcgcggcgggggaaagcgagagggagagagagagagagttaacgcccagtggatttttggagctgtgttgggctgtccgtgctcggcccacctccggcctcggccacgcgccgcccattcactctcagcccaaaaaggcccaaaacaaagcacctcctcttgttctttgtgttttttttttcgtttcgagtaacaaagcacctacacttatttttttaagaatggtatttttaaattaggaacttagtcgtaacttagccctcaataaccatacacatgtaacaccatatttacaccccccgaatgtgcttccctaacactttctaagagatgaaaatcaacatcacatctttaatttcactaatgttacgttgaaagcacggctgactgtacataatatttttcaatctgtccgaattctagcaaataccttgattttttattacgagtagcacctagtatccatgtgaagtcataggctttgaaaacgaaagcatgttttaaggcctggtttagttccaattttttttcctaaaaaggtaacatcgaatctttgacatatccatgaagcactaaatatagataaaaacaaaaactaattacacagtttgtatgaaaatcacgagacaaatcttttaattagtctatgattagctataagtgctacaataacccatatgtgctaatgacgacttaattaggctcaaaagattcgcggtttccagacgagttatgaaattagtttttcattcgtatccgaaaatctcttccgacacccggtcaaatatcctatgtaactcctaaattttttttttcacgaagcccagaaaagttaactagtcacaatcgaaagcacagtgcgtcaacggaaaaagacgaaacggtaatgcagccgcattcaagtgcagcagtcgaagaaggcggacgccgacgacgaagattcttgcgtctccactgggcatcgacgactcgcgatgcaaatgcaatgcacacaagattccgaacagccgagctctctctcgccacttgttcaaaaccaggtcacttaacgtcttcaaccgtatatgatactccacttggacttatttttacagataatatcccgcttagtttctagaatgaaaatatacaattgtggctttccgaccagtttacggggtatggattatgcctctatttctcagaaggaaaaaaaattctacattaaaattgcttagaaaaactttaatatatactcactaggttttaatatttgacaccattgactttagggtatatattcgacaatttgccttattaaaaaaatttatacacataaaaaattaatataaataatatttaaagtacctttaatgataaaagaaataaaataaaaatgataattatatatttttttaaataagacgagtgatcaaaagtgtgtctaaaagtcaacaacatcgatcattgaaagccaaccagagggagtactatttttcagctttattattataaatccagaaactctctattgaaatatgccacatgtgcgtaaataaagaaagttggatgcagtcgaacattacagctctctagttcgccaaaggttctacccagggaagaaatgcatatcaggggacactggaagctgcccccttcattcttccaatatcatgattcttttggttgtccagccaggggaagcatgggcatcacttgggaatgcatgcaacatgtcctaggcttcaatacttttcatccattcccaaggatcattacaatgtgctagtttatgggtggtaaatgggtttctagctggtataagtactacacagcacacaaacaaaacaagtcaacagcaaccccttctgtctcgatcggccactgacagaaatgcatttagtatcaccaaagtcccttaaaaaaaacagtaccaaacagcctcgcctcattagaaaagtagtgcgaatctccaataggagaggaacaacatgcatgccaaactgttacatctttaaactttcttgaacgaatggacggtgaaagtatcaaagcgtagaataattccatctatatctcggagttgatttgatgattcttacagttcattgaaggggtcgtgaaagagagtgaagggaaagatactcagctgcttttgttcagttattcttcctcgtgaggtgatgtccttttcgcgagccgttcaagactggaaatgcagctcttctaggtcaaccaagtacctttctgaatgttgctttcttctctttgtattattgtttcagtatgcggtttagtccacgcattcggccacccctgaaaggagaaaaggaaaagatattgacaaaggaaaatataccaatatcagttctttactgtttttctctacaatactttgtcctgtactattgctcatgactccatgccaagtggccagatcttatttagttccaagtcacataaggcagagagcactagtactccctccgtcccaatataagtgcatttaggacaggatgtgatatatcctaggactacaaatctggacagttgtctgttcatattcgtagtcctaggatatgtcacatactatactaggtgtatttatattgggacggagggagcagtacttaaagtatatttgcaactttttactgaacttggtgtgctgtgtcaggcgactactccagaggattgattacttcatgccttgacaatgatgtgaagtagcatgaccttgcgattcatatgggtaagcttaattatcaaaacagaattgcagttaagtagtaagatcacagcactgcacgaagcaaaactttcaaaatattatactcgtgcaagtacaagccagttagtaccaataggaatatatacttgcatcatgcccaactccagagtttaaggtcgttttgagagttgagacagcttacttgtttgtagtcggggatcgaggcatatatacacccaacccagttcattgagtgatcagtagagagattcttcccctcttctcctgccagctcttccaggttctgagttctgaccatggcggctggagcgattccaatggcgtaccagaccactccgtcatcgccagactggctgaacaagggcgacaacgcatggcagatgacatcggcgaccctcgtcggcctgcagagcatgccagggctggtgatcctgtacggcagcattgtcaagaagaagtgggctatcaactcggcgttcatggcgctgtatgccttcgctgctgtctggatctgctgggttgtctgggcatacaacatgtcgttcggcgaccgcctcctgccattctggggtaaggcacggccagcgctcgggcagagcttcctcgtggcgcagtctgagctcactgctaccgctattcgctaccacaatgggtcagctgaggcgcccatgctcaagccgttgtacccagtcgccaccatggtgtacttccagtgcatgtttgcgagcatcaccatcatcatcctcgcaggctcactgcttgggcgcatgaacatcaaggcgtggatggcctttgtgccgctctggatcaccttctcttacacggtctgcgccttctcgctctggggtggcggtttcctcttccagtggggtgtcatagactactctggtggctatgtcatccatctctcttctggcatcgcaggcctcactgctgcctactgggtacggcaaagatctctctctggttaaattcaccatgccacttctgcatctatgatttctgacatctcgcaccatgcaggttggaccaaggtcagcatcagatagggagagattcccgcccaacaacatactgctggtgctagcaggggcggggctgctgtggcttgggtggacaggtttcaatggaggagacccatattcagccaatattgattcatccatggcagtgctcaacacacatatctgcgcatccaccagcctactcgtgtggacaatcctggatgtcttcttcttcgggaagccatcggtaattggcgcggtgcagggcatgatcactggcctggtatgcatcacccctggtgcaggtgagaagcctccccttcctccattagcaggtggactagctcagctaagaccaaccccttaaaatattgcaatttgcatcagtaccttgtcaccataggaatcaattgaaaagtctcaaactaaagaaaaacaagcaatagtaccttcagccaatcaggtctgcatctgacgaagtcaataccaagaatccaataccagcatcttctataacctgcacagtattgtttgcattgaaaaggaaaagaaatgctttttttttaattccagtgctggtgcttactacagcatcaatggccttaaggaacacagctaattttattagtgtatattgtaatcttgttttctctgatgcgacactcttgctactaagttaccagcaaagggcatctattgacccaggtttttaaaacatgtgccagtcagaatccatccatttagcactactgattgattattttatgagaaatggattcagctgctgttcacaaactactattttgctttcataaatgctaaactaacttgatccattgtgtaagaaagcctctgttttgtcccaagttcgactaattttgttttggctctccttggcttagaaaatttatgtgtcactttctatcttatgcaaggataattatcaaccatgactgactgaacatgatgctgaccttgggttttctaccaaattgccttaggaagctagcaactttcctgattggtttcaacatagaggaataatgccttctagtaattaaattgagttaattgttatgtacaagctcgtttcttttattctctggaccaggcacacttttgaaattttacaggttcaatattcaaacctatccacccacaaaatgtgtgctagcatgcacaaacacataggaaacaataacattccatgtcaccattttagatttgttcccctgagtatcataacaataaacaaaacagaagaagtaaagatacgagacagaaaaaaaaaacaatgtggagttcaacaattttcatgctaggtgtgaaagtatgtaaatatgtggttattttgccattttaattgttcagcaaagactaactagatgtgtcctgattcatgaacaggcctggtgcaaggttgggcagctattgtgatgggaattctctctggtagcattccatggtacaccatgatggtgctgcacaagaaatggtcattcatgcagaggattgatgacacgcttggtgtcttccacacccatgcggtggctgggttccttggtggcgccaccactggactcttcgccgagcccatcctatgcagtctcttcctatctatcccagattctaaaggtgcattctacggtggccccggtggatcacagttcgggaagcagattgctggcgcactatttgtcactgcctggaatattgttatcacctccatcatctgtgtcatcatcagcctaatcctgcccctccgtatagctgatcaagaactgcttattggagatgatgctgtacacggtgaggaggcatatgctatctgggcagagggagagctcaatgacatgacccaccacaatgagagcacacatagtggtgtctctgtaggagtgacacagaatgtttgaacagtacccactttattgaggaaaaagaaatataattgtctttttttcagcaatcaattgatggaacaggtgccagcagatgggcagaaaaaaatacaatcatatagaggacaaaaacaagaaattagcttattcatccctcgtattatagcagttgttcatgccatggttgatgcaagcattagaatcattacattaattttctgtggatttcaactttcttttttcccaaacaaaagcactaaagaacttgcaccaactgacatctaaaagatgcaagtagcatgctatcgatcataatgcataatcacaagtacacagggaggaaactgctacacatgcaaaatattcagatagggaacatacataatctatattgtacctatttctattatcacagtatgaagccacgcttattagaacgccacagcccacagaagggtcttcggtcttcctactgatcagaactatggcactgaattactacatccatccctaaagagtgtcttttgagctatgaacttggacagtggtcaaaagacactcttttagggacagaggtagtaggacttagcgcttgccacaacaccatgtccattagctacacaatcctacatagtttggcacactggttcttgtcataagaggtgttcagacttcagaaacgtcattcaacacaaaataaaccaatctaaactaacttatgttcatactacacttgccttattaccaatctaaactaactaacacaaactggccagttgcccagttccaaccggctaccatcaatatattcctaaaaacaccactgaattgtgtatcaatttaataaacatggattcatgggtattcacaaagatgagagaagcttaaagaataacgacttacacaaacttgtaccttgtttcaaaagtttatattttcatttcttagagtacagtttgagtctgagtcggtggaaactcgggcacatcttctaaagaacccagaagtacatctttctcattgtcagcagtaagtctaaaaggttagtcgatgcttctttcaagtggcataggaaagtgcatactgggtaacattttctagatatttttccaattccttttctccactctcaagagtctcccaaagtgatttcctcaattcctcgtttccttgactttttgtaacaaggtcataagcatagcgcataacatggctgcagtatgcagcttcatcatccatacattcttgataggatgattcatattgctttggattaaaaacacacttcttagcacctttggtccacctcttcagtatataggtttctggaatactgcacacattcttgatgctaagagctttaagagcatgtggacaaagcaaacccattgtttcaaacttactacagctgcaattgagttgcattgtcatcatatcaaaatgaactgtgcagactcttgatcctcgcccttgcattgtcatctcaaattgatatctgttattgtcttcgcaatgaagctccttgaattttgtggctccacatccatcaagaaaatacgtctcaaacaacttgtagattctgtatgtataaacttttgctgcatgattcaaaatatcactgtgctttataatacaagcaggaggcttttggctgcaccgcgtgtcttcatcgatctctttttcacgccaatcttcagtcaacttgtccacaacaacaacaattgtagacggagaggtaaatttctcggcaatgcagttaaagatgttactcagactgtcacattgtggctcatattcaaccccaccatcaaaagtgtgtttgttgagagcaccacaccacttctgcttgagtttataaagtttcttaagccatttgttatcctccaacttaaactctctgagcatcccagcccatgtttcctcaaactcagcttctgagtcacatccctgcatacacttggtgaacagcttattaaatgctttggaaccattaagtgtaccaagacgagaagcagcattcttttgtatgtgccagcgagagatgcgatggcatgtatttggaaatacttcctcaattgcctttgacataacttgatcttgattggtaaaaatagagcgaggatgccgattgcccattgcctccaagaaagatttaaatagccacacaaaagatgacatagactcgtcagctaatagagcacagccatacatggtgttctgccaatggtggttcacaccaacaaacggagcacatatcaaattatgtttgtttaagcgataagttgcatcaaacacaacaacatcaccaaaacagtcaaagtcaatcctgctcctgccatcacgccagaaaaaattagtcatccgaccgcctcggtctatttgaacatcccaatagaacataccatcttcatttgccctgctcttaaggtgtcttacaaggttctgcaaatctgcattccctatggcaagtgtccttgccatactaatgtagcatgagagtgaatcttgctttgacgtctctacagaacttgacctccctgctataagtgatcttgcagaccgtaaaagatgtcgttcttcaggtcttgccaagttgtggttgtgatcagagaccagccggataaccttccactccccgtggttattcactctgaagcgaaccatggccttgcaattcgtcctagtatgtgggtcattgaagtttgcatcagtaagcctctccccttccttcaggccctccttggagcagaagtaatccttggtcctgatccttttcgtgccagtaaagtaggactgcttcccctttcggatactgaaccccatgcggtgcccatagtcacagtacagcttgtacgccgcctcctcgctgtacactaccttgcggagtagttcctcggtgccctccttgctgccatgaaccgttgctgcctcttcagtctcggcttcatcaccatacgccctcatccccatttcatcaccagagttagtaaccgccccttgtccttccatgaccctgtcgccaccagcatcgtcatgctgcgacccaattccttgatctacaccaacgcccgtctcaactgcgacgatagcattatcgtcaacacacatcggatctccacccccgccttcacagccaccttcaccgtcagtgttcaccatcactgcaaaaccccgagataattgggatcaatgtgtcaaagccacatcataaggcaagtgtaacaacgacacacctatcatcattcctatatatcaaccgaaaaaatcccaaaccctcacatagatagaaataaaataaagaaatgcagcaccttcctaacggacatagtggcggatctaacataggacatggggggttcagtttttgggaaaccatcaaactgttagtagtattaaggttaaggcaaaatttctagaacagaagttagggttaacgcaaattcgagaaaacaaaagtgcgtgggtagagagagagatgggagcgtaagcgtaacggatgcggcggaagcagtgggacgagcgacggcgaccctgctcgctcgctcgctggctggtgcgacggatggggatcggcgcaggcggcggtggcggaggacgtgctcaccaggatggatgcggcggaagcagctggacgaacgacggcgccccctgctcgctcggcgggatggatggggatcgccggagccggagccggaggcggcagcggtgggcaagggcaaactgacgaggaggcctctgtcaggattactccactcacgctgtcacgcaagcacgacagaggcgtcgaaatggcgagggtaacgtagtaatttcgcctagcactcaatccacccggattgcttgcacaccccaccaccactctacccaaacggtgaaaatatgaaaaataaaaataacggaattgctaaacttcaatcgacagaaaacctacctccaaatcttgcaaattttgcttcactagatatgcttcacgattcgtgctccagctgcttcttatccaactccgacgaactcctcttcttgtctggtgccggcgacaacccaatctccgacgaattagggtcctggggtgagatggggtgggagggggaggggaagaagggggagttcgccgggcttagagggatggtcgtgggaggcggcggcccggcggtgggcggcagaacgggtgggcggcgagcgtcggcgccggtggcggagccgtggggatagaggagggtggtggccggtgttggtggcggggggcatagcgagcttgtatcttgtggtggccaacggtagcggatccggcggcgaagagtcaccggagacgaggaagacggcagggcgggagcatctatctcaccttctatggcttgaggagggaggtgaggggggagggggagtgggaggaggccggcccgggggggtgggcctcgtcggcgccgttcacaccttccggccagctggcgaggccggacagcggcacgctggggcggcggtggaggcggcgcgctcgcgctagggagagtggcgatgtgaggaggaatcgggagatgaggtgatgttttagggtttggttgcctgcacgaatcttaaagcaatcggatggtctaaaatttgcaagatttctaagggggttttctatcaaatgatctatagacagtcccaaaaaaaaaaaaaagagtgtccatcagtcctaatcccaaattttcaaatgaagcctctggagtcttgactggctcttatgaggcgtggctttttattttaatttttatagggttgatatgataggtaaatataataggtacggttggatactgctcgattaggcatggctcatcaaacagaccgtgccctgttggcctacatgctttaggttggagctcaggcatgacctagtgagatgttgagttatgtcatttggcctgacacgatgtcacaccctgaaaattcaaaatatataaattgttgtttaaatggaattttttagaatttattttttaaaagtcttgaagagaagatctaattttaattaataaattccaatataaaatggggccagataaaatttcattaaatactttgcttaattctataattcctagatttttctgggatttatttgagctaaggaagtatttttaaaaaatggaattgcatttaagaaataatttaaattgaaaaaggttttaaaagtcttcttttggctttgggccgaaagtcggcccaaaacctctcttctctctctcctcggcccagccggcccagtccgccgcgcgcgcgcgtccgcccgctgacaggtggggcccgcctgtcaggtcgtcgtcttcctcgcgtcggccgccgcccggaaccctagcgcgccgccgccgccgttcccttccaaatccggccgctcctttccttctccggccgaattgatagaggggaaatgatcctcgggatctcctctaccttttctcctttggaaacatcggctaaatcggtttggaatgtgtttgattcgagttcgaatcagatcggtctctttccttcaaaccccgatctttccttctcgtcgccggccgccgtgggccttcgccgccgcctcctagcccctttaaaaggctccccggtgtctcctctacccgccgccaccctcgccttcgcctctcgtcgtcggaagcgccctagcgccgtgtgccctagcgccgccgtcgccgccgtcgctccagccgtgcgccgccgccgttccagtcgtcgccgtcgctcgggaaggtcgtcatcgtggtcgccaagtcgccgccgtcctcgtccgccgcttcgccaccgtcggagaccgccggagcatcgtcgccgtcgtcaagccgaagaccgccgccgtttcaacctcgtcgccgtcgccgtccgttggtcttccgccgtcgctttggtcgccggtgagttcgccgcgtcgcgctctacccgttggtgccctccgttcgtgccgaagcgccgccgttcgccggcgagcatgcgcgcccgagccgccgagccgccgccgccggtggtgacgtcaccgctgacgtcatcgggaccgtccgccgtgagccggtcgtggaccaatcgatctcggccgtccgttttggatcaagtcgatctcggccgtccgttcgcgtgaaccgccgccgtgcgcccggtccaccgcaaaccctagcccgctgacgcaataaatccctttttccttttcaaaaataattcattattgcgtcataattcaattaaaatcaatttaagtgttttaatccgatttaatcttcaaaaattcataactaattcatcttagctccgatttagttggttcaagtctctaaatttttctaaaattgagatctacatgttaaaaatatccacatgtactgttcatgcttgtttatgtgcttttgctcttttctgcttagattccgtcgtttccggagagtccgttttcgccggagaagagtttgaagagttccaaggccagcaaggcaagtcacacagatcccaaacaactctttgagcatgttgatcccgtttaaagctattgtttcttttcaactattgcatttattttcgaatgtcattgggtggaattaacctattgtttgttatggcccttttgttcttgattaccttattccttgataccttgggttattataacttgactggttgagctctatatattggttcaactagatattagatataattgcttagccctgcttagaaacattagcacactattgggataacttatgactcactattatttaatgatggcttaatgatagttcacgatggtcaatcgtgattagttaattaattcatgtgccaactaaaacctggtaatggtgggttgtgagcacatggttttgatggtcgtgctcatgacaattaaggaccggttcacgagtttcggttgtgaaacattaaccgtgccaaccacaagccagcatgggcaacggctttatcttttgtatagcatggttcattgcggggcaccagactgagaagtggcggagataagcccacgggggtcgctggggagtccatgccttgtttataagggggtgattatgatccaggaaggtgcgctgcagtggattgtgttatgcaaggggtattgtcacaactcctttccgaggtaccgtggtggtattgaggcacatggtgacatgatgtggggttgtgtcttgtgggtacagtagtacacctctgatcagagtaaaactattcgaatagccgtgcccgcggttatgggcgggtctaacaatgtctttcgtgattagtctcacacttctcaccatagtaaatgatgctataattggtaataatttgtttagctcctggtttggaatggtacattcctggtttggagatagaactgtgcagccgggatggttgttcagaatggttgggcctatacaacagggtatgttgtatagcgttggattaatattgtttaatacttaactgttttactaaattctcaaatgtttgctaaatgctgcttttgcgaatgcaaccctactatgccatcctttgttatcctgtgcacttgcatatttgctgcgtggcttgctgagtatgtcatatactcaccttgcaatcattcatcagaggaagagttctacagtgaagctgatggtgtggaggattaggtgtagccttggtcaagctgcctgtggagtggagccgtctgcgccgtttatcttattttccgctgcttagatctttattgtttgagaggaactatctacctctgtaatgacattttattcgcttattaattagagtaataattgtactctattatcaatttgttattgtgtgcctcggctgattcctggacgagggtttacacacatgtaagcgtttggaattttggatagaaattccgggcgtgacacacgattaggttacgttggctacgtggaggttggttagcccaaatttgatatataccaagaaaaaaatgtgaacatagtctgttgcatcctgctgcacaaacttcgatgaagctttagcgaggctctccgctcaccgatagcacattcctcttcctcatcaagaaccaccatggcccttcacttcctacttccttcgtcccgagccggtgagctcccaattgctgacatgcttagtggttgtgctcgtgaatagggttggccacaccacaatgctactatgcaggcctacgccaatgagcgttcatcattacttcctctttcctgatcccctagcttcctcgattctttagttctcatttccccctatctcctgctcgcgacatgcacttgtcgtgttggcatgctgggccggtaacaacccaagcacaacgtggctagatgggctatgccaacacaacccacagctaaatgaaatgtgttgttcttgggctgtgagttgcacatgcgtgcctgggtggacacagaaagacccaacacatttgacaacatataggaggatttggtaaacgcataaccattcttatgtttctacgtatgagatcaattaagacacctcagtcgcacctaattaatttgattagtgtcaaattaaaggaaaactattctttaaagatgttctcttccattatactccctccatctacttttgattgtcatatttccaaatctgaaaaatttatttttgattggcatatttcaattcaacaacctatcatcttaattactttctcggatttaatgcatgactctccatttttccacacaagattggctacatggatattgagaaatgtaaatattaatgaatcgcttgtttatgagggatgattagtagcatgtttaaatgaatgataagtagaattacttatccttggtctgtgtgtcaagatgaaatatgactattaaaagtagatggagggagtagcgattacgctccaactaacactaaaaaaataacactctttttcccaaaataacatgcaagcacaatataatctagaaaacatatccattttcttcttgtttttattagatcaatttcaactatgtgtccagaggcaaaaaaattatttcaatacgtggaatgaggttaaacagatctcatgcatatatacacatttgtgttgcttatctcgttggtgaaaagaaaaaatattgtctccctaaataaacacttgtcaagaaataaggtttattccacaagctatatacaaccttgctatcttaaccatccaaccattacaaaggcactggagagcctatttggtagtaataatttacggtgttaacatatcacaagataaaaaaaaagaacaggataaaagaaaaggaagacccaaggcaacaacagaaagttaaaagctacaaagacaaactaataacgaaaaggatgcgacatctcatcacccccacaactaccacaaagtacaaacatgcacaaaaacaccctcttgccggcaacagcaaagcttgaactcaacatcttatcagctcttctgcaagtcacagctggcatgggcttgcttcacctgcttggtgtactcgtcctcgctatcgccttcctcgccctcctcctcatccctgtctccctcgtcgtcgtcgggattcttaccgtcctcctgctcttcttcctcggtccaaccgaaaccggccactggagtcgacgatggaggtggtgtctttgcctcttgtacaatcttcatgatctcgtcgacggtctgatccgagaatgtacgggcactgttgtccttcttgtagtacttcgcttgcgccgcttctgtaagctcccgcggcaagttcttcataaaccaagggtggtttctgatctctcttattgttattctctgcatgacatggtggaaatggtattatgttaaatggaacataatggaacatggattgaagttccgcgaggttcacctttgcaggattcgcgacaaagattcgagagaggagttgtctacaatcttgggatatatggacgtactctggtattttgtactgaattgatacgattctctgcaaaataaaaatgtgagcataatatatttgtacattcgtgtggcgtttgaagttggaatttagagaggctgaagtgggtgaattattaccccgattgtttttctgaaattcttgggatcatctgggtcctcaaaagggtaagcaccgacgagcatcacataaagggtcaccccacaagaccatacatctgccatctgcacatagtgcaaacaataatgttagtgtgttacaaaaacaagagaagcataatttcaagaaagaatgaacctcaaaaagcataggaaattagagagtagtcaaaaaaaaaaaaaacagaaggcactatattaacggatcaagaactcaagaatcctggtggacagaaaaaaggagcagaagaatcccaagtcccagcagttcaaggacagagctctttgaaagagtatccagtaagtgaaactagcgaatttaagtctattgttcaggaaaatgtgaagcaacgaatttaagtgaaactagcaagagtcaattaggagttggtcacatgtgagtacaacatggtggcttgagaacatcagttacactcacttaattaaaaagataatatgcaaataggtattcatgaaggtcattatctttgaaatcaaaaataaagaaaaatatgtacaactgacagatgaaataaagtgaagaacacaatttgaggatagcggagttctgggagcagccgaagaaaatagaaaatatggcagagacctatggacatttgggcagttcgtctagaaacaaccatatattctcctaactgatctcaatgtcacttttaaaaaaatgaaccaatctcagtgccgctttatgatagcctctaccagcaaaggcaaccaatcttgcatgctagaaagaaattcaattggtagtttggcatggtatcccaaaaaagtatgaaataaagtgcaatagcaattggtcaaataacatcaatattaaccagacaaactacagatggcaaaatgaaacgcccaaaaaaaaggatgaagaaaaacagtcccaaaggaccacaggttaccaaccagatgttcagtctaagatggctacatgaaaagatcaggtctgagggcccctattgtacacatcaacatgatggaaatacggtccagaaaaggacataaagcatgatgaatgggaacacaattcgattcatggaacatgtccacggggcctccccacgatacatagatcatcacgcgcaaccatttcaaatctgttcatgcttttttttttctatgtactacctctgaagaaataactacattattgtttttggaactccacaatttttttaggcaatatgaatcctatctgtttgctggtcaaggattcaccacacaacaaagcacacagcgattttgtttttattaatcctcactatcaagcagatcattaagcatgataacaagatctccatcaacagaatctggtgctcttatctatcaaatctaactttctttttggatcatcacatcaacaacaccatgcgagacaagacttcaccatgtataccaactgtgaaccagatcaagggaacaattaaagcaggcacgcacccggagggggcagagatcaccatcaagcatgctgtgattactactccatccgttccaaaataagtacagttttacactattcatgtccaacgtttgaccgttcgtcttatttgaaattttttttgattagtatttttattgttattagatgataaaacatgaatagtactttatgggtgactatttttttttaattttttcataaatttttcaaataagacgaacggtcaaacgttggacacggatccccacgactacacttattttaggacggaggtagtaaaaagaaaaatgtcccagcgacaacatcgggaacatttcggtaggatatctcttcccccctctttgctcctttgacaaaattgtcaacacaaataattggaggagcacttggaagttggagcttggaaaactggaatccccaccccacagaggtaaggacaaagaaaaacactggcaattggggtcaggtccattccctgtctacttgacctcagaacaaaattccaagaatgtaaaaccactgattagagaggtgcccccatgataccatgagcctggtctacaaggcatatatgtctgctacgtttgggttcacatactaaaactccagtcctggcattcacatgaaaagttcagactacgtttgggttggggccggagggactgcagcaagctagcacaagcataggtgacccacacaaggttaatttcaccatccttaaaaaattacaatacattttctagtgtgaaacttcttagttaccttgggatattaaaattttgcgtgtaaaattcaggtgccttaagataacacaaggattgagcacacaccaaaaaaggaaagaaaagaaaaggattaagcacaaagtctccagctgccctggacacaactggagagacaggcaagctagaggagcaagatgactgagactgaccttgccgtcatactcccggcgagagagcacctccggagcgatgtacgcgggagtcccgaccgtcgacttcggctttgagtgcagcagtgatgactgaccacaaaaacattcgcaaaaagaacggtcttagtacgcgtaagtaacccactatagagctaaattaaagagcaataaatacgatattttcgtaagtctaagtgttctttttgccatcagttagttcgagtgatgtccctcttttatgtacgtgaagaaactaaaggattgcttgataacatcatccgataaaaaagactgagaaaaaaaaagggcgcaaagtttgattctcaatagcggcacgagtttaataaggataatgaggatagcgacccagtttcgtgtcaaaatttttgtcctcccaacatgccaagttcaacaaggaaggcttctttccgtatacctttctaccaaaaaacatgcacggtatgaaagaacataaaaatcttccttttttttaaaaaaaaagagagagaagaaattgttaccttggagtagccaaagtcgcagatcttgaggcgcggcgcagggctgccatccagcagcgtgttctccagcttcaaatcccggtggcaaatttgctgcgagatcaaacaaaacacgcaatcctcatcagcttaacattttgaaaaatttatacttaaagctttttttatattaacagaaaaataacaaattattgatgtcctcaccatgaagtggcagtagctgacgccgcaaattagttgctggaagaaatacctcgactagaacagtagcaatccacacgtcccccaatttgaaaacacaaaattaaaattagcacgcaaacctcacgaatttttgagggggcaaaaaaaaagagggaaaagacttgggacccgtctaattcgaggagattagatgatcacctcgtcctcgctgaatctcccggcgctgcagatccggtcgaacagctcgccgccggcggcgtactccatgacgatcgcgaggtgggtaggcgtgagcacgacctaaacaaaacaaaattcccccaaaattacgaactaaattttcaaaaagaaaataaaaataccgagcaagaaccgcgaatttctcagaaatcccgcgaattccgcggccggcctcacctccttgaaccggatgatgtttgggtgccgcagcgagcggtggtttatgatctccctcgccacattctcgtcaatctgcaaaaaaccacccgcaaaccccgctaaaaaccagccaagaaaacgagaaattaagaagaagaaaccctagctcgcttcgaatcacgcacgcaccttgaggccacgcggtatgtacttcatggcgacgagctccttggtctccctgttccgcatcagccgcgccacaccgaagttgcccgacccgatgtccttgagcagctcgtacttctccatggcggcgcgggatcccggacccgtcctgcctgctccgatcgaattcggcgccttccttgcttgctcctgctggttcttggtcttggagaggagaggagaggaaggagggaatggaagaggattcgaagcttaacgaggaggcttctgttttatactcctatttattagtagcggtttctctctcctcctgctcctgtgtgaaattgatttctctcattttatggtgggatttggccatttgggtgtgattagaagttcttttatttttggaattttctaagcatgatttaacatgtacaaatggtttgatatgaactctttagttaatacttacatatcactaaattattcaatatataattgctgagataaccattttagctccatataataatttttttaataaatgctaagagtcgactctgagccgttatcgtgcgtaaaagcaaataagtctctatgtgtaaaaacaaatattgtcctctgacttgatcactgatacgtggatctgtcacgtgtgtgacttacatgaaggtgcctacaaatcaggcgctcgatttttcccaaaaagtctggcgttgtttcaccctttataaaaataatgttttagcacttagcgaaagaatgattcaattcttaaaaaaatgtgaaacatagtgagatcgctaaatgaaacaatttggttcaacgtatgtaacaaaacgatttaagccattgaagcacttaaaccccatgtacatctaaacaaaccccgtgtacatcgagatgaaaatattaaatactatttaaaatccactgtaacatttgatccacccacaaagaaacatcacgagtatattagctgaaacattgcttttgaaccattgaaacatcaacaaacccgtatgtcaaaaatagaaatatggaacactgtccaaatatctattgcaacatttgatccaaacacaaagaacatcacgagtacactagctgaaatacacaaaaaaaaacacagaacctggtctagactgcatcttcctcctctccgacgaacacagggttgcccgcgtcggtcttctccacggcccccatcaccggatctggaggaggagaagggggaggatggcggagatgaggagggagtgctcccaggagagaaagagggagccgacgagcctcctccaccaccactgccgccaccaccgcttcgctgctcgtgcgtcgtcctccgcgtcggccgccaccacggggacgaagacgctgtcaacgtcaaggaagacgaaaagcggcggaggatccgacggagaaggcgacgtgggcgaggttgacgggagagaggaggcagcgcgggtgaggttggcggggggaggcgggaggaagcagcgtgggcgagggagctcgtggaagaggaggcggcatcgacggggagaggaggcgacgtgagcgagggagcgtgcccgatatttttctctttcatcgggcgcccgtgaataaggattttcagacttacatgttagtcacttaaagttaaatggtagtactacaaatgatctgtattaaagttgtttctttttcacgtcactaagagttagatcatctccaataggttagccatcccactctccaagctaaaaattagcaaacatagcaagaaaatgaggtccaacagcctctccatttggatggctaagccatctcgctggccaaatgaccagctcaggtggccaaatctagcaagctagtttggctggccaaacacagcatcaatggctagtagctgcaatctcattcgcctctcccccatcgacgtcgagttccttctccagccgcctacgatccggccgccaactcccctccagccgcctcccccttgccggccgccgcctcctcccgggcgccgtcgacggcaagggagggagggctcgatggcgagggatggaaggcatggcggcgagggagagcaagggaggccggcgaggagcaaatccacgctccagtcgccgtcgccatccccatcccgagctccccccaagccgatgtcgccatccccaccctgagcttcgtcgccgcccctcccaagctgatgtccctgtcgcttgcggactccctgcgccacctcctgcctccccacgccgttggcatctgcgtggtcgatgggaaggaaggaaaggggaaaagaagaaaagagaaggaagaaaggggagagagagagagggaggaagaagagtacatactgttgttgtgggtccattgttaatttagagaggatcaatagagagtctgttaaagtgagcatctagtttgactagccaaattagatagaatccgatttaaagaagctagtgaagatgctcttacatgcaccataacgaagagagcacgtcaatataaatctttgtacatgcaatccgagtgattattgttaacgttgatctgagtgattaggattagcatatgcggtgattagtcgacgtgtattggcgaattttgtagaagtgttggaaacttggaatggtacggcagttgaaaccgcctttgtctccatagatatagacaacatcacattactgatagataagttcaaaataaattctcttgtacagtactgcaccgttcgaagatatatggcgtccttttttgcagagtcaacgaataaaagttttaactagtaaccaaacttacaaatatatgtatttagtgttatgtagtatgtagtgtcactgaatttatatttaaaaatatttttatatatattaattttgtagttgttgataatatattacatattatggtatctcgtttcatttaacatcaggtttagagcccattctaattgcagaaataaaaaaacataggattagaaaaagcataggattccataagattcacctaaaaatcatatataaatgaaatcccccaaaattcttatgattttcttttgaatcaaaggaggccttactacatactttcactttactacatgctagattaaaataagtttcactttacactaaattgtgtcatataattgaaggaaaaatcttgtgaatctaagcgaacattatcaaactttttcaatttagaccacattttatgaaatgttgttcaaatttcatgaaatttatataggttttatggtgtactctgatgttaagtaaaacttattttaatgtactctggtgtaaagtgaaagtacatgctaaatctgatacttgtacaatgtaaaacaagttacaattaacttggtgaaaattacaatttactatgtattataggataaatcaatagttatatactccccccgtcccaaaaagactcaatttctgggttttcatgtctaacgtttgaccgtccgtcttatatgaatttttttattattagtattttcattattattagatgataaaacaagaataatactttatgtttgacttatctttttaaactttttcatatttttttaaataagacggacggtcaaacattagacacggaaacccagaaattgaatttttttgggatggagggagtagtatctaatacaccttgtatttctcaaggagaggaggtaaaatctgaaatgaattggttcgatatttgtgctttaagtcgtcctttcggggaaaaaaaaccagttgtctactcatttttcccatctcttctctcttcaccttaggaaatatatatatatatatatatatatatatataatataattcattccgttatttgaaataaaagaagctatagccaattattacagtgaattacctaacaatagtttgaattacaaaatcacaatttaattaaaaactaaaaaaatatttagaacaccaaactaatgacagagataacactaataacttctacctatggttgttgaggaattgcataaccgttgtatcttcagtagtacgttgtaagaagacattgtctttctcaaattaggaaatataatctccaaaatcagtggccaatcattgcactggtcgaatttcactcacatcaccgccgacaactgatatcgaacaaatgtggaagatatcgtcggagaataactttagtgcaaatcaatagctcgcccaaatcttaccacactgccatagccattaaagccactgagctgacgtaggttcccaacaatgaccattgccgcacaaagaaggtcctccaaagcgacgcctcagaggaggacacgacgtgagatgccgctaccactctaccaggaccaaagcaaaaggttttacctgaaggccaatgtggagggatgggaagaagtgaggatgcctccaagaagaaaaacgatgctcgaaagcatcaccgtcatcgaagctagctagaatctagcaaggctttcaccattcgacaactccctcatcacacataaccagcctacatgccaaatagtaacattgtcatccgcaaaagccaaagttgaaaccacagcaacatcgtaccaccggcaacccagcccctcgaagctccccacaacctagccaggaggccaaggaggagtagtgatggagccaagaaagcttgcaaagaaagaaactcactatcgtcatctgtcgttgtgtggctaaatccggacgtagaagccctagatccactggctcttatccctagagtcttcactatcgcactagggaaaattggaaagaggaagccccgccaccatcatccttgccattgcgtggctagtaattagctcaagtggcagcaaggcggaggagaggacaaatataaccaacagcgttgtctgttgatcgccacccgtgtcacttacgagcgacgtggtaggcgggggggagggggggtgaaatccgactagttggttagtatgcatatcttttgacttgttggggaggtaccaaagtctatgcattggtttcaattaacgcgtaaataatttaagttactagtacaatggaagtaaacatcgacacatcgtagcaatagaaccatattcgaaattttgaacatcccctcgatcaagagaaccatgccattcaaaaactatgagttatacaatcaagagaatcacttaaagtttaacattccatctcataagttttttttttgaaaaacccataggcaattttgttgtaaatgcccacccctatttagttttattgaaaaaaaaacaccccccaatatgcacgtgcttaactgaatcacatgttttcataaattgtgagttatcaatgtgatttttaccaaaattaaatacttctaagattataatcttaacaattttcttggagatttcataaataaaattattgataagaacttaaacattgtcaaactaagtttcactatatgcacacaaaaattcagtgaaacatgagaataagtctaataagtatttggataagattgacttgactagcttagcttagggtggctcacattggtgataacggactgattcggttaagcatgtgtataatggggattttttttcttaacaagactgagtagggatgggtacttgtaacaaaataacttataatgtcgaatgccaacctttaagagacttatggggtgttttgcaattttcctaaaaaaacatcagtcacaaacatttcctacatggcaatcctaaacatacataatcatatcgttgatgcctaaaaatacatatttttgtgttgtcaatgagagccggtcttctaataagttaaacacaagtaagtgatcgacaaacagattttcctcccggacaacgcataagatattatgacggttccaaattgatatgagatccacaaagatacgattttcatggccaaattgcataaaccatagggcacgtctctctgagatagctgatcaacgaaggcgtaacgaccaacgagagaaacacctaattctgtaccatttgattacctcggtaattaatttaggcaataataatattaatttgcataaggtcagtcttaattaaggtggcatgagggggccacgtgggaggggggcgaccggacgagcgtgtgtgatgatcatgtacgatgtatatatgtgtcagctaccaagcacttgtttgacttgtttgaggctggggttgatggtgatggcacacctacataatctctcttctccttctctccacacgacaagaaaacacgggctgtgtttagtttcaaatttttttcttcaaactttcaacttttccgtcacatcaaatattcggacacatgcatgaagcattaaatgtggacgaaaaaaaaccaattgtacagtttgcatataaatcgcgagacgaatcttttgagcctaattacaccatgatttgacaatatggttgtcagggttatggataccacatacctaatagtagttgactaaatctcggcaggacccaccacataccatgtcttatacggaaactgacttcacgtatggagggagttccggataaggaaagacaaccagagttctacatagaaacgacatgaactactcggattatatctatattggtttttctagttctacttggataaggggacacctatgggtataaatacaaggccccctaggaggagagagacccacaatcaacatacacaaaacaatagatcaagacagaagatcaacatacaagccaacatataccaagacaagacgccggatatcgacttcagggataagcacggctagtcccctacggtgtctccgggtactgtcaggagagacgaaagcgctatctctgatctcgccgggcacggattcgaggaggaagactaccctgttgtcgactacgagtcagaccttcagaccgtcatgtcgacaacagttagataggctaccgcaaatattgtactggtgtgattatggtgaataagagcaatatcggcttcagccaacaggatgtagggttattactgacaattaaggggcccgaacctatataaaaatccccgtctctgtctcttttacctcagtctcgcgtatatcctagtaccaacgatcctcatactatgcaaataccggaatcgcgacatcaaatgtcgacagttgcgcgccaggtaggggatcttttggtgcttcaaggtttcgatgagatgggtttaagagatggattctccgacaacgagctactcgacgacttcagctgagggggagatccaacctaaccagatcggaaccatcatcgtcattgacaacttgatctatcgagatcatccaagcctcaagctccgcggcgtaccaaaagatgtcagatcgcatgatatcgaacaagtacgcaacaaggtaattggtagattggttttttaaattgatctactaatttcgtagatacatccggcatgtatctacaaaggtacgcaatattttatctgcaatttatcgtacctattcagatcatacaacattgttagatctatgatttattatgtttacctagagcatgttttttatacaatatctgttgcgcgagtgtccccgatgttaattgactacggtttaatgctgggggctcgctctgttttcttctgtataaatcatgcttgtttacggtttacataatgcctgatatttacatctgctcgttatgtcctgataatgctagaagatccatgcagtcttttgagtacatactcgatattctctgctatatgtcttgccttctagaaaatattcttcaggaacaattgagcacccgagtaggttgtggtcgagtacaccacattatcgagaatgatctcgacaaatgcagagtcgtcgagcccaacctgccaaggaagaccgacgacctatctcatagcaccggccatggctggactactcgagaaaaggttattaatggataattcctcgcgaacgtcgtcggcttgatcacccgatatgattgcgaacggacatccggatatgctataagttgggtatgtgagttatgctggccacatgatatgcacatataataaaccaactttagcgcccctataggtgataaagagactcctactcctggttcaatctctctcgccttacttctagtggtcgagttacgactactacctggtcctcgaccagcggtgtagcgattctcccactatttccacttctaagtggtcgagtttagactactacctggtccttgaccagcggagtaacgatcctcccattacctctactccaacaaagttgatattaggtatacaatatcgccaagtgttttacctagagatcccttaccacgatgacacctagcgttgaaacctatcctcatgtccctttacgccgtcttgacaagacctctgaggaacctaagggaacttcggctggggacgcccagagccgataaggccttgtcgaatcctgtagagacaaaagactgtgtaagatctggtcgtgtaagagttctcgcagtgcgtattaaccaagccatgtaatcggaaattgggttttccaacttcacggctgggggctaggatcagtgcttgttcaatcgaggcaggtcaaaggtccaagagccttatctcccgagaataattctccgatgacaaggctgggagctaaggagagtgtatgactcaacaaactgactgatcgaagtcggtaaaagagaagacgctcatacacaaaacattggtctgtaaatttaattcatttttagtttccatatatattataacatgtcaccctttgagcgtttgctcgggggctatttctatctgatattttttttctgagtgttgatttcaggaaaattctattcgacattgacgaagactccatgtctctatggttctacaccaagatcgactaaggcgagtacgacaaatgttgacaaggctccgtcgtagattctgcgccttctcaatcactcgagaatggttggtggatctcgacaaggaatacggaatgaagagatggtgtacccgccgagataaaatttcttgacttcaatccaaattctcgattacagcaagacgggagacttagtcgtctgttctgtactttcttggtcgacgtcggagattgactcagacaaaccctttaggtgcccgcacgaggctgataaaggaagtctaacgttatctccgaactcatcgagaacggtcacgtgagctcgataacagttactccaaggcctgcacgcggttgagaatatgaattcgttcatttgcatcgaagtcgggggctactgtcagggttatggataccacatacctaatagtagttgactaactctcggtaggacccaccacataccatgtcttatacggaaactgacttcacgtatggagggagttccggataaggaaagacaaccagagttctacatggaaacgacatggactactcggattgtatccatattggttttcctatttctacttggccaaagggatacctatgggtataaatacaaggccccctaggaggagagagacccacaatcaacatacacaaaacaatagataaagacagaagatcaacatacaagccaacatacgccaagacaagacgccggatatcgacttcagggataagcacggctagtcccctacggtgtctccgggtactgtcaggagagacgaaagcgctatctctgatctcgccgggcacggattcgaggaggaagactaccctattgtcgactacgagtcagaccttcagaccgctatgtcgacaacagttagataggctaccccaaatattgtactggtgtgattatggtgaataagagcaataccggcttcggccaacaggatgtagtgttattacctgacaattcaggggcccgaacctgtataaaaatccccgtctccgtctcttttacctcagtctcgcgtatatcctagtaccaacgatcctcatactatgcaaataccggaatcgcgacatcaaacgtcgacagtggtgctatagtaaacatttgctaatgatggattaattaggcttaatagattcgtctcgcaatttacaggcggaatctgtaatttattttgttattagtctatatttaatacttcaaatgtgtgtctgtatacttaaaaaaattttagtacacgaactaaacacagccacgattaagttacatttgatccgtggtaaggttaagttctcaatttctttttatcagattattatcggccgcagttaaaatctattttttttttaaaaaaaaaaggttgatatttttgagaaaaaaaagttgagtttgacagttattttgtaataatctacttttagcatagttttgaaacctctaataatgtagatgtgaaaaattagcctataaattcgccgttcaaaaaaattagcctataaatttgtttattttttcacagtttatcaaccggagcccaaacgatcgaagtagatcgattgaccctataatattttagtaatatttctaaagttatgcaattattataagtttcttaatttttaatgtagaattgacctaaaaccgaaagatgccaacctggatgaatatcatgtccaatggcttttagccgagaggatatgttagagacagttattgctacttatgtgtagtttgtacaagtagtaagttcttatggtactccaagttcgcattcggagcatgaaaattattttccatttcagccgaaataaactagtactcgaatataatgatttctacgttgtttatcaattcctaattaaggtaaaaaaaatttaagtcatttcagttattgattttaaaatttttatttacttggatttcctttgaggcatccgattggctttagaatcattgaaataatgataatcatgagaaacagcgcgcaattctttatattatggtataaaatttaaattgcaaaaattatcatattttggaacgcatggagtacttccctatggtattccatggaaactttcatactactacaatattcgcataaatatctttttgaactgtcgtaaatggtggttatgtacaaagatagagcctaatatgtacagttagataatacatatttatttagcggatatacctctacaatagttgacataacaaaggttctaatcattaaactaaacaaaataccacttcctccgttttttaatagatgacgccgttgaattttaaacacatttctgaaccattcgtcttattaaaagattttacgcaaatgtataagatataaatcatgcttaaagtatatatgtatgataaaaacaactcacaacaaaataaattagaattatgtaatttttttaataagatgagtgatcaaacgtgtgacaaaaagtcaacggtcatctattaaaaacagaggtagtactattttattactgttatttcctttttcgcaccctagtaaagccaagcaccctagtaaagccaagcttccattttatagagagcaaataatcgttgttgttaactgtagaaatgatgtttttcctttcttctttctatctcttccattttagtaaagattcataatcaatagtctcattaattaccattgtacacaccctaaggccccaaccattggtatatgccgaagggaatacttcggcgacaaagggaatttcggcattatgtaacgtacaaattcacaaagaatgtgtaggattctttatatccaaatattgtcccatttgaacgaactgctgggcaaatgcttcatacgacgagcactctgtagtggaatagtgccatttttattctgggaccaaaagattctctactgtactaggttatctcggccccgcctgtttgtggattactcctactaatcaaaaacaattttagagacgacaaaatgactaattttaaaataaatttctggcaaaacttaaaatcagcttcgaacaaccagcagcattgccagcgtccgtccattgccagttgccacgatgtcaccgcaatggcaaagaatgatcaaagcaagcgacctgacaagacacgagtgaccaaaatgccaactgccacggcacacgtggtcaccaggctgcagccccaccgtgtgtgacagttacaccaaacagaggtcttaacatccactgtgtgcggtagcagttgacacatcaaccacgcggttatcatcatcaattacagtacatgcagtagagtgtatgaaatgctatcacactccaaatcttcgtcgcaatgcgtgcagcatggaaaaaatcttgagccaaaaacaaggccattccagaattcatcccctgtttttttcaaagccataaattaaagccgatagagacaacttgcatggcgtgccatcttcacagtttgatcaggccacaatgacatagtttctgaatatttggccaatcaaccaaactatccaacggagaaagaggcgaggctgtacaggaaggcggcatgataatctcaggccagcttaacaaatggaacatatcagtctaagacatcacagagaaggcaaagcgattaaacggtgtatccagtctaacctaatgttttcaccagtgctttggttcagaaaggaattgagctacaaatgcaaaggggggcaaagaatagatggtatctacgtggccctatttacatttcaaaagtaaactaagcgcacaaaagtcctagggcgttattatagcaaggaatttaccatgttaggctggcttctggctggctggtggattcaccttgctagccccgttcaccgctgtgttggcccggttgttggctggtgttacggtgccaggcgccacattcttgggcactaacaagttgccctttgagctcatgctttgctgcttctggacagtactttgggtgcctgtggtagcaggagcaggtgccttccctcctaatgatctattcagcacgccaactatgccgctagacatcccaccctgtggaactggagctttggtctttttcgcagttgctggaggtccagcaaatacagggttgcttttgccaactgtgggcagcgtcttcagctgttttttctggctgccaataacgctttgagcttctggagcaatcttggcagccttgctcttatccacattatccttatttaagcatccttgggccacaaagcgatcaaattctaacatgtctgcatccttggggtctatggcctcctcaatcttgggatcttgaacatcttcctgcttcacatcctcagggaacaagtcctccattgtgactgcaaaataattagagttgtcatctatttccattttgtcagaagatccagacactggtgtggtgttcagtgctttcttagtttctgataaatgcactccagcggattgtcccagaggattaaccccagcgacttctgaaacattatgaacttgttcagttgcatgtgcagtcaaaacttgagatggaccaccagtactttgtaattctaggtgttgatcactgccaagctgtgtcccaggttcaccagccacagtaggtgttttagatcccgtagaagattttgaagatcctgttcctcgagatcttatgtgcacagcttttgtggactgtgcagcttttaaaaaattggtggcaacacttggttcggcaattcgcccaccagcagcaagagctgcctcttgtatcgacaaagggccattcacaggaattgattgggcaacttgtttcttagaattatttcgtgacttatttgaagcatttgatacttttggaggtggaggtgcagattgcgcaggtgcttgatgcaactgaggtggtggtaactgcacttgtactggttgcactggaacaggcaccggaacaacatgcaccggtaccggcaatggtgaaggtgctgtaacagatttcacctcaggattcgtagtagtaaccattggattgtgatgtggcacacctcctgcatgaacagttcatataagcacaaaaagtatcagcaaagaccaccccgaagatcacatgggaaaaaaaatgccagttgcgatacctggtcttaatgtagacgatctggtcgtcccaatggccaatgaaaatgctttttgtgctgcctttagttcctccgacataacattgggtattttaggggtagcaggcttggttgacccctgacgcttgcaaataagcgcccatctctgaaaaaaaaacatacattatcttattagactacagctgtctacatgaggaaaatgggggaatatcaaccatggttatcagttatcagcagtcacaactgccagatgcacgattacacaaaagaactcaactaggatgggtgaaaactctaatataggcttagatgaaaagcgatcaaacgattgcaacagcagcacacctaattttttaaatacttgcactgtgtgcaaggaggtgccgactctttcattatagaattgttgcaatgcatgtaaccataagttgggcgacttcaggaatggtaatcccatataggcgaataagaatgaacaaagcacaatgatgggtgctggtatgcaattgacaaggtgatcttacctgttgaagttgaagatgcgtccttgaactatcaaatttatatttatgcagaatttccatccaatttccttcaccatgcttctgtacacctgctcctagttccatgtcctcctctctggaccatggtttaggcttctttttctttttgggatgtccattagggtccaaaggatcaggagatgagcctgtgtgggagggctgctttgagctggaaaccggacctgtaccgtttgttagacggtgaccaggcacaagctgtttatcagatggaacacgcactatcttttcatttggagtgtttagcgcagcagcttctgagttgacacgttgaccagaggtttgttcacgtgaagatccggtgataatagtctgaaattgcatgacaggatcaggtgccattacacagaaccacaggcctcaaaagaataccatgcaaaattgccaaagaaactagaggttaggtggttttgtgcatcacattccatacgacaatcttttccataaactaaaattgattgcccttttatgtctttctagacacatgtaattcaagactgcctgcaagcactataagtgtgccactacacacaattttaacttgtaaattattagatggcagggaaggccacacactgaaaaaagagaacatttttcccatgcattttcacatccacaaaggaactttttattgccctatttgtagtgaaaaacacacggagcactatcttccagttgataatgaagcaccaatcaagctatgaacactgccagtattgagcatcaataatagcctttgaatatgtttgcccatattctgtctatctcaaactatacacactagcataactactaagttattcaacaacctatgttagtgtcaaagcataaactgtgcttgcggaagccaacaataatagaaacactacacattatcagatagatactgaacggtgataaaataggagatcacgaccataatcaaataatatgtgcaacaactgcctcgtatgaacccaaaatgacacacgcacacacacaagaactacataatcacacagaaaaaaaaaggtgcgaaaataaggggaaatcaaccagttttagcatcttatactcgaaagaagcatccacgctatacgaaattataggcttcggttgtacaagataatggtctttccagaaagtgataccttggcaaacgatgtggcctcagctaatgcttcattacccggagcagggacaatctcaatctcacattctagatcactcccatcgtcctacgaattatcggtcacagcagcacagcaccatcagagaaacgaacaaccaacactgaaaacaagctgagatctacttctactactgtataaaatctcaacaatttcccgaatatatataaaaaagtaacagaaatctcggcgagtggcgaaccagcggcagggaggcgggctcgacgctctcgacgaactcgtggccgtaggcgaggtggcgccacagcatctggtactcgcgcgcggaggtgatcccggtgctcgtcctccgcaccagcgccctccagtcgatccccttccccgcgcccacctgcttccccatctcctgcagcatcgtcaggatcgtcgccggctggtacctgcgaggttcgggggggggggggggggggcagcgccgcgccggtgaaacgaaaccctagaaacgacccgccgcctccgccgcggggcgagagaacggagagagagagagatgggggagatggatttacctgtgcaggatgaggtaggcgtcgtcctcggagaagctgcgcttccgctttgccgccccgcccccgccggccgccgccgcgtccatctcggagtgtaaccgactcgtcggcgcttggccggggaactcctttttcatctccttttctgttattatattattttttctccccttcttttttttttctcgatttgcttgttgatgagagcgaagaggggatgaagaattgaagatagtcacataggtgaggtgaggaagcgctgatgggctttttgtgctgctcatcccctcttctccatccccctcttaagatcctataaacaagttggggcctcctttgcttttgcaaatggcaaattatagaatctgagtgtttgctcaattgtaaaacttctcaaaaagtttagtatttcagaagaaaggtgttctctttataatgttatggtacggacacctagttagtttcataagaatttcagaagattgcattcttaaagttttattcttatatgattcaatggattcgatagtttggtaatatacatcctatagaatgattttccagccctttttttcaagaggaaaataagcatgaggcaagagcctctacagtgtgaacgaaaaatcgattttacggtaggagaatcgaatcatgcacagtgtcgttgttgaacgtcgtaggtgtcaaaacaaatcgaactcacattggagtcgaacagaaggagtaaaatactatttattgtgcatgcatgcataaaaggtacaccaatgattgggtgattctcttttacaggtcctacaaaacaaaacgatttgaatactatagctactgacctgaaattttgttcaactcttcgattagattggccgaactaaacactacagatgccttaagagttcgtgatttgtcttcctgtgagaagtcctctgtttatttctctctacttcctctatcacccaagagtgattcctataaaattcatgtgatttatttcccgaggaccatcaggcactagctcaaatatttctatttttaaaatctaacaatattccaaagagcacaacgtcccattcagtggcagagccagtatttgaacatgagggggcagcttactaaatgataattaatacggaaaaatagcatgacaattaatatttttgtcttctaaaagcctcacacggataatgtgtacatatgttttggcaacacaagagaattaattttagccttattatacgttgccaaaatatataagaacatcgttgcagttcaaaaggaacacataaaattacacaagtatattaattgaatttaacctcagcggttagctatttactattgcaggattgctgcatgcaaagctaagcagccaacacatactacggctagttggccaaggactaacccaaatcgcaacctagtatccatgcatatggtttgttcatggggggcctaatacactgatgaataattttttagataaatatgtgattatttgtactacttaacaccccccaagcagagattccatttatacgttgtttttcttatttctatgtcttttagaaggaaccggctcctctaatgttcaagacgcatgtcaccgcgtaacattgctcacacatatgttgtccaaattaatcggacgcacctggtgattctttcgcaaaacagtttctcgtaagcaatcgttttagagagggcttagcttagtcgctaatacatgagattacttcttctctctctaccttcgagcagatcgtagtgtggcaaagaaaaagctaaggaccaagggacgaaaaaaatccttgctaacacacaaagagcacaaatctccgatgtctttctattgaaaaatcaggggaatgtggtttgaaagttgtggtatagggaagagtatcatataggatggttgatttgccggttttccattgccgctatatatatgatgctgttgtatttttttagaacttaggacttaggagatggtattgtgagtcaggtgatcagtacaccaaaggtccagagcgccgttgcgtgtcgtggaccaaagcattggcgtgctgttaccggtgagtagcgcgtgtagccagaggcattcctattctgtgggtatgtggcaagttccttttttgatagagaagaacaaactaaagattaattcaaggattagcggaggaagacgatatccctatagagctaggccgtccgattaatttggacgacatatgcacaagctacgttaggtggtggcgtgcctcttaaacgttagaggagccgattcccttctgaaatctggttttctaaaggagccctaagtatactagataataaattagtgacctaacatcctctaaaaaaactagtaatttagtacaaggcaaagtggcacagagaaagagttaggataacaccagtagaatatagagattgcatagtgggttaaaaaaaactaatttaagattaatattttgtaaaaggggatttgatgattttccactctttactctttaaattggggaacatttgatgatttgtcattcaagtcattgactttagaggacactgcatgtcattgtctcggtagcaataacctttcttctcacaatataaaaagttcacaagtcgtgttttaaaaatgtatactcaagtatgtcttgtgtgtagcatataactatgtcttagatatttatctattattagttgaggccaaaacaaaacgacggacataggttaggatgcatgacaacatggcttatattaagcattaactttcacccctgtttcattttgaagatgttgtattggtaataccaagatggaaacaaaagaccatcgtttgcatccctcataggaagtttagccgcgagagaagatttgaaacatcgatgtaaaaaaatatatgctacgaataaataatgaatctaacggtttgaaaatcagaaatggttccatagtgtagtggttagcactccagactttgaatctggcgacctgggttcgaatcccggtgggaccttttttttcttttgtttcttttctttgtgatttagcagctcatgcatgaacaggcgatgcattgggtggttcaatcttagcacgaagtgcagctttttattcacctgtttcttttttcgtttcttttctttgcgatttaacagctcaagcatgaacaggcgatgcattgggatctttttcgtttcttttctttgcgatttagcagctcatgcatgaacaggcgatgcattgggtgattcagtcgtagcacgaagtgcagcttagctttttattcacctgtttcttagtccaggggataggcaagctccatgttcttcattcatcagcagtctacatgcccgattggttcgtttcgttttttttttaattacaggttctgaatgcctgggtttttcttttcacaatccagattacacattttgcagataagtattgctgcaattctgcaattgtactctgagcaatctctcttttgttaccagtacaacttaccactggtaaagctatgtcactgactgcttctctgaaccatctgaagctgcataactgatatttccagcctacagaagaacatctctcctgcctcctcattcttcttgccatgtctcatttattgcgtaagttagttatcagtttatcagtcactaagccataaaattatgagcatgacaaggatccatccacgttacagtttctcagtttcccattgaggttcatacttgacagcaattagtgattaagctaaaacagaagcaactagcaaatgatgtgattgctcttgtttttgtaagcttatagaggtaatttctggcctctgcacaagctctcatataggaaactccagctcaaaaggcctgtagatgaattaattcaccacaccatgcgtttgcgacaaactgctgtagtacctgaattttactgactgaatgaacttctgaaccactgtaccataactggattctgttatcagtcgcaaggcactgaacatacttcagaaaatagtatcatgaagatatccctaaccaacacgttatatgttgtatttgtttgtccatgctttttgcttatcatgctcaattggtcatgcactgacaatacatatgactctataccaaattgtatttagtttggcgcagcttcatctgtaagcagtggaccaagaccaactaactgtatctattaatcatgttcctcttcggctttcgcatatgtttgtaagtactagggagtagggaagttggtttcagcgcatccaagatagctgttgagattaatctgagttaagttgggaagacacatcactgatcagatgaaaaacactactgttcttttgttctattaatttccattagtgctacaaaggaagaatttctacctccaaatcaaccagttctattcattcagattttacggcatgatacataatttttatttccttatattactagattttttctatcacaaatcattatggccatttgcaaaagggatttttttaaaatttccatagatcgtttttttatcatttttctcttcttttcttgtagaacaactcctgtagcagctgtttcatctgctccattacataccaaactcccataattatgcagatttatctgttccaacctgcttgcgtgatgaatgatgataactcatgtgtcttaatgcacaatctggtccagagaaaccgtacaaaagattacatgcatggatgactgattgatcatcatatgctgagccttaaactctcacagcgaagaactctgcatcctgtttagaattgctacctgcagacactctaattacatgcagtatttcttgtcatgtactcattgtattttgcatatcattgcctgatgttgttctgctatctacctgacctaacgaaggaaccaatgaattgacagcttctgaattcattcttatcattcttccaagaccaatgcaaactagtagagaacagatgattcatatcaatcttcagacagcaagtacgcaatcaaggatggcatgtagcctcttggtacctggtacctagtacctggtgataccttaaagatagtaaaaatgttgtgtatgctgcattcttgtttattacataatcgcgttaaagatgaaaacatgtgccaatattatgaatactatctgtaaacagtagtctgaatttttttcagaagatactgtcagtgaatgctcaacatgttcagggcattacaaagatttcattatgaatgtagctttcggagtgcacacactttatggagcaatatgcacactagtgccccccacaattagccggaccacagcttttcttgcttgcttaatgatgctgcatttgccctgctaatctgacggcgacctgtttttcaggctcaaacagttgcaggcaaggtagtaaaattggaggctgaaaatataaaactggagaatcaatgccattcatttctgctccccattttgccgttttgcgtcatgtgaaaaatgttcttttttatataaagaagtgcttaatggttaaactgcaatgctcatgccacttaatttcaacaagattaggtacacctgatgcgtacgtttatcatattactattgtgtctgaatatagtatgctgtaaattaagaaccgtcagttcagagtttaggcatcagagtaggcatttcttttctgagtaattttgtctgttatatgcacattttgtcaagaactctatctttttttactgacagttatctcaactaaatcttcgtgacccgacacgcgaagtaaaatgttggattcgacggtaaaaacaaaaactatttggccttcaaaccgttctctttaaaagaaaaaactggacttcaaactgaagagtaaagttcagagccaagccaaataatggacttcacccaataatatattaggtcagcatgtaccacatggccctttgacaatggctccaagattagggtgaaagtgaaagaagaatcaccccaaattaattttcctcgaattatcggttgcaacacgatgccagatactacaaaacacagatttaattatcctgtactcgatattcagaaaactcccgtcagctaggttagcctttgtcatcttcctggtgtctgttgcaagctgaaaacgctgtcctagctagctgatacttaaatgataattaacgccatgaatattgcatgataaatggtgactaattatcccaggagaatcatttatggcgtattatctccctccgtttcaaaataaaagataatttttatttcattaggataagaatttaaccaacaattactctattatgatgtaatttttgtgacaactaaatttgttaaattggtgttaaaaaatacttaattatggttatgcttttctatcacattagtgaaacaaaatatgtcttgtattttcaaatggagggacattatccgaacagatgatactaaatgatagtagcaattaacaccatgaaagcatgcatgacaaatgatgaactaattaaccaggacaattaattgtttaagccatctatctagctagctatctccatcgtctgaacaaacgcagacgacacagacgcaggtagaggattgcagaaaagcaaagcctaatgacaatcaaaatcaggcgctttcctagcttgtttagtgcttatcttgctagcttttgtctctgatagcagctggttactctaatttgcttcgcttttctgggtgttttgctctccgatgctttgcttcgctttgcttttctcctcgtcaagtcagtgatgaaccccgatggcgaaatgggctacatgtgtcattcgatgcatatgcatccatgggcgtgtagatttcagattgggttatttgcgatgccgagtttccaatttaaatggatgaaaaggggaagtagctggcatgaggaaaaaaaaattccatcgttttcttcttctttttttaccgtgaaagtttaggtttcttgtatcgtgatttgcaatttaccacttgagtaagtctgtaaaaaaaaaagaagaaaattgggattgcatttctgggcatgcatgaatcctgggaagctgcctgaattcagagtgcgttgttccaaatgggaagtttcactccaaagctactactactgaagataactgaaatctgaagacagagaaaagtacatgcactgtaaaaaggtagccatactcattggatcgttctgccaagatcagtactgcatcacatcgatcaaactatatctatatgcaactgatctaaatctgaatttgttaattaactagagtagggaggtagtatatatacagtcccttgcatcttctgcaacccattctttaatcaactcaaaaaaagacaggatgaagtgaacagccgtgcgcattatctcagtgattagagttaaaacggttaattgcaaccatcaccatcctcgtgtacacgtggtgctgaaaaataatcggagaacctactgtccatgcaaagcttttgagagaaatgtgattcaacgacgtatcaccagcagcctaaacctccaaatcgcagtgtatatattacaatttcgtcacagaaaatgaattaaagtttcaaattgcagtactgttaacttgtgttaccagcctcgcttttgtgctttgtttgttgaaggaaacatcgcacattagtcacattctactttttacaaagagaggacgaggaaaaaagagcgaagagacggtagggctaaagtggtattaatccggcgctccgaatttcaaatgtgccatcagtgcacaagtggactttaaactcgctctgctcataatcctgtcgtgaaatacacttctaaaaccacttaccagaatatttaaaacaacttgatcttaaagacttgaactaatttgaaacacgacagcttctgccaaatcgttgcaaaaagaaaaagaagaacatatttgtgaagaatttgagctattcgatcccgttcttttcttactctctccgtctctaaatatttgacgccgttgacttttttaaacatatttaactgttcgccttattaaaaaaatttaagtaattattaattcttttcctatcatttgattcattgttaaatatacttttatgtatacatatagttttacatatttcacaaaagtttttaataagataaatgatcaaacatgtttaaaaaaatcaacggcgttaaatatttagggacggagggagtaactaaaatacatattttatctcaattttcattggcacattttcaaactgctaaatgacccatttcataaaaaactatatataagtttattttaaaatatcaaacaaatctttttaaaattataataattaatcaattcattatgcactaatgattaccgcgttagttggttggagacagtaactaatccctcgtacactcaaaataaagcagctcattagcatacaattaattaagtattagtcatatttttttaaaaaaatgaattaatatgaagaatttttttaagagaaaaatacactatttaacagtttggtaggcgtgcctataaataacgcaagagagtaacaaggcatggtttagttcccaactttttcttcaaacttttaacttttacattgcatcaaaattttcctacacacacaacgttccaattttaatcaaacttctaattttaacgtaagttaaacactccccaagttaagaaaggggatgtttagcccctccctcccacacaccccaaccccaaagccaacaaacgatctcagccttaattttgccacagctctggtaaaagctttgttggcgttgctgcggactgaagcagccgggttggccacgtcaccgtgccacgtggccgacggcattgcgcgcgcggcagcataaaaggcgacgccgcgacgcgacggccccagcgagttgcccccacccaccatgccctcctcctcctcgccgcccccgccgccgccgccggcgaccaccgcaactccacgccggcgccgccgccggcggctcctcccgtcgtcggcaggcggcggaggctcctcctcctccttctcctccaccaattcgtcgtcgtcgtcgccattcgtctccttcctcccgccgcccacgtcgccgtcgccgttccaccgcttcctcccctccccgctccgcgcctcctccgtcccattctcgtgggagcaccgccccggcatccccaagacgccggcgaggtcatcccgctcctcctccaagcagccgccgcccggcgtcgtcggcggcgggaagcactacccctccgcgccgccgctcccgctcccgccctcgctcctctccagggcggcctccgacccctacgcctccgccgtcgtccccgccgagtacgccgcctccggcgcaatgccgccgcatccgccgccgggctactactaccccgccggggcgaaggccgcccgccgtctccggctccggcgccgccggccgcggctcgccgacgccctcgccgagtggctctccgtgctcagcctctaccgctcctgcaagcgcgtcgccgcctgcttcgccgccaaggccaagccgccgccgccggcgccggcgccatgagagctcgcgcgcgtgccatctctctctactactcgtgtacgttttactattattagtttatatgattattattgtgggtttggatttgtgttttggtgtaattaatcaattcgtgtgattaactaagatgggagtatcatacatgaacaacaagattcttagtttgattaattagtgtgcttaataattaattggttaataatctccaataaatcggcaccattagttatagtcaaatgtttgttgttgttgttgccggtgaggtaagttggtgtgtgatagcttcactgaggttgggcttaggtttgaacttgtggttgagtttctctgggtgaccattgctgatcaaattatctttagctaaagtttctctgggtggccattgttgatcaactgtgtaagcatgaaattaatttaaactatctttaggctgagtgtcgaaaaggggttaggattgaatttttttttttaaaaaaaacaagacaactcattagcacacgaaattaaattaagtattagctattgtaaacttggatttatttgtttttacaaaaacttcaatatatattctttaaaaaatatataatatttaatagtttgaaaagtgtgctcacgaaaaatgatgatgtatcttaccctaatttcttcttagaacttaacctaggtatagctaatgttacatacagacatggcaggctgccgaaatgagcgtgcttatagtgtttttatacacatggcaacatatgagtagaagtatagaacatacctcaatgtatacttgcaccacccaagttcgagttatatatatcaaacttggtttaaaatttctcttaataaattggagcatatgacaatgtttttttttaaaaaaaaaaacttgactggcgggaatgaccgttcctcggcttttcattaagaagaataagtctcaaccaatctgtccgagaaagatcgcgaactctgccccccgacccctatacggactggttctttgataccactgtccactgcatgaggatctgttctccattgattaattcttaataagtatttatatagggttagcaagtgatttttttaaccaactctgaactacttgagcactgtaatcgctaagctacaatccctttcgtatatgccaaattcttcgtaataaaagcgcacgataccatgtttattggctataaccaaaattatatggatggatgattgctacattgggatctactaaagacatggtgctctatattaaaattgctacattatatgtatgtatatatatatatatatgtatatatatatatgtgtgtgtgtatatatatacatgtatatatatatatatgtatacatgtatatgtatatgtatacatatgtatatatgtatatatactcaatttcaacaatggtgcccgggcaccatggagcaccaaacaaatttaataaatataaatatatatatatatatatatatatatatatatcgctgctacattgggatctaaagatagggtgttctatatatattaaaactgttccttttatataaattgcaatgtgtccttttcgacaagattgtgcgagattatcagagaagcaccgcactgtcaactcgcacggattcttaattcctgccatttcttttgctatttgcgagttgtgaccttacttgttatagcaaccttggggattttttttttgtcggggctgtcataaatcattaaccaacagtcgatgtaactgcacaccaactggttgattatattacgacatgctgaccatataattcttgtagtaggtttcagtctccaaaatactatcacaaaaaatgtttcagtttaaatttgaactaatgagtattcttaagacaccggagtgtctgccaagtaaagatgttagccttcattccttttttgaaaaaagaagttgctcactagctagtgatgcaacaattattcacaggccatgatcctgttaattaaggatttttttaaaaaaaattgatagtggtcagctcaagctctttttcctcctgagtcctgacaatgcaagctagctaaccccatgctaaagtccacaataatatatagtccatggattcctcatgcatatatataaagttaattataaacaaggcatcctaattgtccattaattatagattcttattatccatctagcaataattaaactactacatcaagcagcatcttcatcctgtagaaagagtacacactactttgcagccaaaggggaaccataatgcgagtgaaagaagagattctttaattaattccttcatgctagctactggaatactagttaatagctgtttggttcactccctcactttgtcaaactttaccacactttctagaatacttgtttgtttcacttccaaagttgtggcatgccaaagtttttcaattcaaagtctacatgtcatacacctatcttttagctaaaagttgcctaaggtgtggtcatcaatttataagccacaaatttagctaggtttggcaatgtttaggagtgaaccaaacaactccatgtgtgcatgtgtgtgcaatatgccaccgaaccccatcagcgattgtttccttgccgaaaagcgtggagccttttcctctcgctgggtcttggcatggcagattgattggcaatggtggtgtttgtatggtagtacatgcttcctccgtttttttaatagatgatattgttgatttttaaaacatatatttgatcatttgtcttatttaaaataatttataagaacaaatgtataagatataaatcatgcttaaagtatttttaagtgataaaacaattcatgacaaaataaattagaattagaataagacggatggttaaacatgtgataaaaagttaacatcgttatctattaaaaattggagtatatgtattatatgtatatgcatgtggtgtgcatgacatgagccgtaaggcaaggtgacatttctgatgacaatcaaagctttgcttgcgtcttgcgtcgtgttgtgttgaattgtttgctgcttcgttccagatgaaaaacaagcggcaatgagcagaagaatacagcgatcgatcgagttcgttcttggttgctaactggcaggggcggaaaaacagctagctggaaggtcgtggcttggaacggctcaaactggtggtcatataatgagtcgaacggggccatgtttggattttttatctcatgagcttatgagcagttcatcacgagctgcttgtttttttactcccttcgtccctaaatatttgacgtcgttggttttttaaaatatgtttaaccgttcgtcttattaaaaattaaaattttaagtaattattaattctctttttatcatttgattcatgggtaaatatacttttatgtacacggtcaatcatattttaaaaaaccaacggagagggagtacactagtaaaaatgatcattaattgtgtatatatgctttattaactagtacgtagtattttaattgcatccaaaccatttgtatttactttttttttaccgcagtcagtaaaggtttcatcggtcgttttgccattcaatcctatatatacttatatagttcatccccactaaatgtagttaatgatattctctcttctctcattaaaccacatcaactcaattatttctatcttttagatgatagatctatggtctaaattgtctattctttcttctctcattaaaaacatgcaatctcaattattttttaggcttaaaattgtatcaaattgttttagttttgataatcaaattacattttatttttacatattatgcaatttaattttccgcagcaacgcggtggggtattaatctagtttaactgatgagaaaggcttgagggcgatcttctggctagccagttctaaaaaaaattgtctcacccctctcttaataaatttcgatacgggcccccttcctctcatatccaatgcctaatttcccaaccactaaccacacaagcgcgacgtctatctcctgatgtaattcacacctatgtatgtgacaccattccatttacctccggttgctgaacctaaccggaggcaaagaatatacttcctccgtttcaggttataagatgtttttatttttggttaaagtcaaactgctttaagtttgactaagtttatagacaaatatagtaatatttacattaccaaattagttttttagtaaattaataattgaatatatatttattaataaatttatcttgagtcgaaaatattattattacttctataaactcggtcaaactttaagcattgactttgaccaaagttaaaacatcttataacctaaaatggagggagtattaggttgtatcacatttttttcttatattagtttattttagaatggaaggagtacgcgagatagagaccaacatagtacacatagagatcggcaccacttgtccacttcactcctcaccaccatggtggcatggcgaattattgcgcccccatgagcccatgcggcagccttccccttcctcatgcagctataccttgaggtggaatccggatcaggtgcagtcgctgctgggactgcaacttaggcagtaccaattttcatcaacagatgcaaatggaacggtccagatcagtgaggcatactgtttatagcactgtagcaaaacactgtagtacataatactgtttgtacggtcgctgtatcactagatctgagccattgatcactgaaatggacggctgaaattgcttgcagttcttaagttgcagtcacagctataactgcacctgatctgaatcccttgaggtgcacctgcatatggattgatccacagctgtagtagctggagagtggactccagcccagaggatggcacaaggacaatgcgatcgtccatgttatctttcttcttttctgaacctctctgatcatctccctgtttcttcctgaatctttgctccctctccctcatggaccatgcatggattgatccatcatccatgacccacacagggcgaggagaggctagcagatctttgcaagggtcccccctccaacaatctcatgaacttgggtacatgcaagcccacattgtacatgtagtgcagcacatggagtgaatgtacctgcacagaacagtgcagacaaacagaaatgaaactgtgcattccattccaagacaagaagggttgaaaattcacaagcaggagggtttttggtcactatctatatgtgcctgcagagtctgttgatatatgtagtagtactactagtcttcaggcattgcacagctggagtactatataacatgtccatccatgattgtctcatggtagtacagtacctgacagctgcaattcttgggctatctatccatctatttttctttctttctttctcctacaatatacaatggcgattaattaattaattgatcatgtatcaatcacaccctaattaagcatccatcaccgatcttggtttctcatcatctggccatctccatttctttcttgattttttttctcttattttttctcacggttttccggcgtcgctgcgtttgagcagtggacagtttgagcaaaatttgcggcggagaagaagatggtggctgtgacgtcacggtcactgccgcttctgtgcatccgccagcgccttgatgccgtcgatgtcgaagtcgacggcgggcgacaccacggcggaggagggcctcctgctcagcgggaagagcttcccgccgccgccgccgccgccgctccgcgccggagcatcgttgctgctcttgctcagcctgtcgttcttgctcagctgcgccgcggctgccaccgccgacgagctgtcgccgccggcgccgccgccgccgcgagctgacgacagctcctggctcctgctgtgacagggagcgcgacgccggcggcccgcgtacacgtcctggagcatcgcgcggtcctccctggtgaggccaccgccggtgccgccgctcggcctcgccaccgccggcggtggcggcgaggacgacgacgtcgtcgtcggcacctggtgcggcggcgtgaggggaggggagcgcaccggcgacctgctcggcgacctggacctgccaccgttgcttgggcggctgtagctgatgaggtggtgaagccacaggacgaggtccaggatgcacgcctccgtcttggccttgtccgcatggtagaatgtctcgatcttgatcacgtctggctgcccagccgccctccgcatcgcatcgttcctgtgtaaataaattagtttggaattaaacatgatgagaatttcttgcgttcagtaagctggatgtactgtacacacgcaattgcgctgctagataatgatacggaatatattatgtataaaagataatataacaatacagcaatgcaactcgtacgtacatgcttccagatgaaaatgtgataatattcctgtggaacaactctaactgatttgatgtatattcgagcattcgaccaatctacagttttatactcccttcaaccctaaatatttgacgcccttcacttttttaaacatgtttaacctttttttttcaaaaacttttatgaaatatgtaaaactatatatataaataaaagtatatttaaaaataaatcaaatgataggaaaagaattaataattacttaaattttttaaaataagacgaacgatcaaacatgtttaaaaaagtcaacggcattaaatatttagggacggagggagtaatttatagtttgaactttgaacttgttaaaatcaacagcgcgaagtgtttttcttgttctctgattagcatggtaataatttttggtcctgttttctcatgttttgataacacaataattggactgattaattgatggagtgcacggatgagcaatgatgagcatctaaccctgtgttcgcccactcgccgacccatccgaatccatggtgagctctgatgtagcatacaagcaatgatgaacagaacgtcagtatctggagtagaatcaaaggctggctggatcttttcagtgctatacctggctgtattgttggcaatagggataatccattgcaaggttctctccattgaagatctgatttcagtgatcggaacctaccacagcaagacacaaatttaggatgtgaatcactaatgcaatttatcgagcgattcttttattaagcatcaaaatacctcttgtggttgtgggcaattatgtagtttttttcgaagagcagacttaatagttgggggcagtccttgatagagcgcatctcttgtgctttgtggtggaacggtgcttcgggaaaccttcggttagccaaaatcaagtcagtaaacagattcagtaattcagtcaatgttcaacaaataattgtacttgatgtcaattcagtagaagtataatttgcattattttctttactagaatcataagatctctaactctacaaatatatttttcagcaaaaatttgtgacttgtgactgtaacatttacagaggttgactgcctgaacacaaaagcagcagttctgaaagaaaccattgcagtttaagaatcccaataacttaagtggcttttcaaattctatcattctatctttctcatgccattgtcctgtatggccataacttgggggaatacagaccatactttcgagcggataatatcatagtatggaaaaatatcaccagctattaaatcctatgggaaaacattgacagttcacctgataagcttaagatcatctaaattttgtgtattgacatgaacagaaaaatatataaataacctgaagaaaaacttacaatgttgtcaatctgtgaaatgatattggcatagtgcagcgagaggccagctgatcctaacgtctgacggctctctgaaggttgattcaattgtaaagctccatctacagaaaaaagggagaccaaaagcatggagaagtccaaagtaatcagttggtaaccatactgaattagtgacttgatgattgaaaattctgagcaactaggcataccataggtcccaaaagattcttgaatctctacatgtaaaaagtggacaatatccacaagtttatccatgacctacaaacagaatgaagattacatggttcagattaaccattaaacccagatgacagggttatctttctgtcattatacaaacatttcatctcatgcaaatttcagtacaaacgcttacgtcttcgagcatcttattccaaagggactttttcttcaagcttttcacatgcctcctttggctcttcaattcttgccttataatctgaacagtgtcccctgctcattcattgtactcaaacaatcattctcaaagggaacgactaatggcttcctaattcaatctacaagggtgtgaggtattgatgatgataggtgtacctctttcaaaagcaactgattttttctcttcctccaatttacggcgataatcttgctcaaatctatctaatgcatgcaactcatggtacagatcctatgaacaatataaaaatgaaacagaaactgtattaggaaaagctagcatggagcagatggacatggggtgaaatatgcatagcaaacagattaatgattgacgcaaacatgatctagtagcataataaataacacttggaatcgattctcgtttcagtataaccactaaatacatactgcctccaaaatcaaagcgtgacatttccttttccttttcaaactcaactgtagcaactttgatcactgaattctactatcatatatccagaaaaatatgtgtgttataccataaatatttcactcgtatcattttcattgaaaccatatattccagagaatgttctgtcaaaattatcgtggttgcacacattctatgatcgcattatttcgtgactaggggagtatttaagggtgtaatgtactcacagccgtgtgccgaaccagtgtcaacaattgctgcatctctgcttctgctatttctttcaagtttggttgaggcgtaatttctgattctagcctggaagcaaacaagcacaagatcaaaaccgagttcatcatactctgatatcaatcatcaggacatgtaatcagtgtgaagctgtgaacctacttggaaaaatagcgatcgaggttgtgccactgagtatccttgcaacgattgccaaatctgatcacctctcgcgaaaatagcgccagctcttgcctgcaaagatgaccagaatgtgaagatctcatttacagatcatggaagttagaactagagcaacaagatcactctcatccatcacaaacctcttgtcggctgcagcaattctcatcaactcactcatatcgctagaaaccaaacgctttacgccctccgatcggaggacggtccccttcaagtatctgacgctttctttggacagagactgcatcaggctcatgcccttcactattgtgttggcaacctcaaacgcaagaatcttttgtgggctccccttcatcttcgcgcccgccacaaacccacctacagggctcaaattcgtcatgctgctgctcagtgtgtccaaaacctccactgctttcccaatcccagatgtgctggctctaccaaacaccgagcctttgtctgaagcctgcaaagagtgcaccattacacggtggaaaccggtcagcagccagcaggtcaggagagcttattcagaaatgcaaagctcatgcctgaatatgcacaatctgatacacatacacagaaaaaaaaataaaaataaaaggcaactagatcattgtctcattgtttatgctacaaattgcagtgtaagaaatgcctaaattacgtcaacaaaataagacggagtccacatcttgcagtctctcaactttgaagcaaaaatgttcatgatcgatgttaaccatctattaatccaaatggcaatgctaatcctgttgcttgaagaaatagaggggggaaaaagaatcgggagacttgccttgccggaggtgcttgtcctggacttgccggccttgagcttctccgacgaggagcgcaccagctgcggctccttggagaccgaccggcgagccttgccgccgccgccgccggtggacagccggggggccttctcgggggagaggcggcgcggcggatcaggctccggcgccacctccaccggtgccgtcttgtgcttcccctgcaccttgccggcgacggccgggaacgccttgagctcctgctccaccacgagccccatcgcccggaacgacagctccgccggcgacctgtcccccgggatccccgccgagcacacgccgcccatctcggcccccaacacccaatgcgccgccgccgccgccgacgagctcacaacccaaacacctccaccaccggaatccaccgccggcgatcgacaaccaaacgagcaaaacaggatccgcgccaatcccaccaccgcaatccactgccactggacgccgcaaagatcgcgaacaccaccaagaacgctaagtctcccgcgttgccgacgacgacgaccactaccaccaccaccaccaagaacgcaaaaatccaactaaaccaagcgaaaagaaatagaggagagacgaggcgaggcaccaaacaagggaagaagaggaaggaaggcgcggatcgcgtgcgaagtcgtcgccgccgcccgccgcccgcccggttttagtcaacaaagccgggcgtccgagaccagatttttctcgccccgcggctgcgccaccgccaacccccccgacagcgagagagcgcgcgccgccggtgtggccggacggcgaggtttctccggtgtgatttgatcggagtcggaggaggaggaggaggaggagtgctcgcgatcgtcgctaggcgaggcgagctttgggtgggcgactttttgtgggttttttgtttctaaaaaaagggggggcgaaatggtgcaaagtccacggtcgggggtggattaaaaaaatgtacgggctgtcagcccaccgcagcgatggagccaatgacttttggttgggtttgactttgggcgctttgtcgactacccccacccccaccacaccaccaccacaccacccctctctcctctcatcctcgtatgctcctcatcaatatcacactttggcttggtcacaatcaaaattttttaatcacaaaagaatatagataaatcttggccatagtcaaaatgggtttgaaatttcgaatttgtagtatttttacggtgttttaattcgtagttttttttttgcctttgttgtgactatttttttcctagcatgtaagaaatcaaacaatggcaatacggtcttccttgcaatgggcctttgtggaaagggaaaaaaaaactaaagtgtggatagaacggtgcagggtacgatgacgcaaagatataacgcgtggtgttgaatacatgtgtaaggttttcttcgtttagacgtcttcagtttttgttgcgtggctagcatctacgtaggtttatatcagctatttatttttattcatttatcactcgttcgtcacaccatagctgaaccgcttatctcttctttctaatattttattatactttagatatcatcatactatggacacttatgtttagagatgacaatgggtcggtcgagtttgggtggagcaagaacatgcttgacccgagacccgaaaactccttgtccgcccatgtgcaatactcttcgctgggtgggaaaaaaaaccatatccatgctcgtcgggtactgggtacccactggtaccatgagtttttaaccaacatgacggaactatctattaataggtatagactgtcataattaaacatctattgttaactagcaagtataaaaaccacaagcaatctatgtacaagttatagtcattcgcaaagtattaagtatatatcaaaattaataattctaccactacaaattatagtagcctaggactatgttgcagttgccaccacttcacttggtcacagtcatttttttaagataatgtgtgcccacagtcaaaactggtttgaatttttgaatatgaagcctttttatggtgtttggattcggtaggtttttgcttttgtcatgatagattttggtgtagcatcgttcgcacgtaagaaaaggttccaaatgggatggtgtgaaaacaaacaatggcaataggatcttccttgcaatctgccttgtaggaagggaaagaaaggcaagtgtgggtggaacggtgcagggtgtgatgacacaaagaaaatgtgggtggaacggcgcaaggtgtgagatgacatggagatataacgtgtaatattgaatataagtataaggtttccttcattagtacgtcttcaattttgttatgtggccagcatctacgtgtgtttatattagctatttgtttttattcattcatcactcttttctcacaccatagttgaaccgcttgtcacttccttttaatattttattttacttttagaggttgtcatatcatgtatatttatgttagatttagatctactacatcttttttttcactcctccgtcacactaagattggatcacttgcatctttttccctatatattatttatttataggagtcgtcaaatcttcaggcacttatatgtcctcatatcatatgttttttcattcatttattgttctttcatcacatcatggtaaaagaacctacctcttctttcttatatatcttaaattcttaatcttataggttgtcggaccataacacatcaatgtcaatcaaaacaatgacatccctgtccgtttttgaaccaacagtggataattgatgatgatgatagttcgaggtaccacaaccggggtttgaaacgactaccataagtagtatcattgcctattcctcacattaatcgctggtgatactgattttcaaaaaaaaggatgtaatcaatgcaaaaaaaagtgatacaatttgcattgattcatagtaaattgtgttcatataatcattcatacacactgataaacaatccaactagaatcacacacttacattcgtacagatttatccaacaataacaaataaattcattgtgatattaaatacatgttttcctacaaaggcaaaaaaaaatagagggagaaagagatgtgtaggcagaacggtgtgggatgagatgacgcgaagatagaatgtgtgatattaaatatgagtgtaagattttctttatgaaagtgcatctaggcccctaatgattttgatgattgattacaatgcgattagagaggactaacatttttattcaagcaaatatgaaggttgttatgtcctcaacgtgttgtaatacaatgcatatcccatgaatgcgacatagcgatgcaatgcggcaatgatcaaatggtatattgtatctttttcctcgcattgtgtcgtaggaaagccatactattaagggggatgatgcatagacatataaggagtgatgcatgtgctcaaaatcaatttttcttcgaagcatttctcttttggagcgttctggaaattttcggaagttccgaaaagaatttttagaagttccgaaaatacacagaaccgtgtttgagcgttctggaaattttcggaagttccgaaaatacacagaaccgtttgagagctctctggaaattttcggaagttccgaaaatacacagaagcgttctggaaattttcggaagttccgaaaattgcgttgacttcgactatttctcatatctggaattttcggaagttccgaaaatcccttttattgcactccaacgggcagatttgtgatgtgggtataaatacccacctcccctcacttgtgagggctgctggttccattccaattatttgtgccattggcttgctctctctctagttcatttgagccttgcttcctcgattcatctctccacccgtgtttgatttggatttggtgtgtgtgtgtgtgagagtgtggattcgagtttgtgtgggtgcttcttgtggtctttgtgaagatttgtgagcacttgcatcatctccgggagttctttgcatcatcttttactcttggaggttgaggactcctagacggctaggtgtcactcccgagccaccgatctacttgtggttggccgggagaagtttgtaaaggtcggatctcgcctccgcaagggtagagatacctcttagtggaaggaggagtgcttagtgcaacctcttgaggaaagggttagctaaaacccggctcttagtgagctcctcaatggagagtagaatcccctcaaggatttgaactccgggaacaagtttgcaagcttcaccttggtgatatctcttcatccctctcctctaactttgcttgcttgtgccgctattggtctagttgctgtatgtgcctttgattacatgtggtagacttctagatctagatacttctttttatgtgcgctgctctgtgcatttttggaagttctgaaaatcctttcggaagttccgaaaattcccagcctagttccgaaaattactgcttccgctttacttaagtttttaaattagcctattcaccccccctctaggcctaattgaccttttcaattggtatcagagcctaatatcctaattaggcttaaccgcttggagagatcatgtcgggccaagcaggggatgggatcgatggtgataagggagctaagatcccttatgactatccccctacatctacatcttatgtgagtacctatagcggcaaagctccatatttcagtggtacggactatgccgcttggaagcataagatgaagatgcatttgaagtctattaacccatctatttggagaatagtcgaaaaaagctatgttttgcagaatcccgaagatcccaccaaggaggacgacgagaacgagcacaagaacgctcaagccgctaatgcaatacttagcgccttgagtggaagtgagttcaaccgtgtggatggcattgagagtgccaaagtgatttgggacacgcttcggaacttgcatgaaggcacggatagtgttcgtgagtccaaggtggagatcctcaaggggcaatttgagagatttgtgatgttggatggtgagagcccaagcgacatgtacgaccagttgagcaagatcgtcaatgagatcaagggacttggctccaaggacatgaccaatgatgttgtggtcaagatgatggttcgagcaatcactccaaggaactctaccttggtgatcatcattcgtgagcgtccggactacaagactctcacacctcgtgattttctcggacgcatccttgcccatgacatgctcgtgcaagagtccaaggatgtcatccaatacatcaaccaaagctcaaccgcaagcatcaagaaggaagacttggctttgaaggcaaaggaagaagaagaagagaaccgcaagagcaagagcaaggcggagatcgatgatgaagagatggctctcttcgtcaagaagttcggcaagttcatgagacgaagcggcttcttcaagggaggttcttccaagcactactccaacaagtcaagtggaagacactccgcaagagtgtgctacgtgtgcaaagagcccgggcacttcattgcggattgcccccacctcaaggatggttcccacatcaaggaagataagaagaagggtgagaagaaggatgagaagaaggagaagcacaagcataggaagcgggaacattatggccaagctcaccttgtgatgatcttcggctccgactccgagtcaagctcaagtgatgaagaaggagtcgtcgcgttcgccgtcaagccttcatcaccaccaagactcttcgacaactcaagtgatgaggatgctcccatttgcctcatggcaaaggagcctaaggtaccttctcctctcaagtcatttaatgttgatcttgttagtgatgaggaggatgaggttatggatgacgaattgtttaaatccataactaaggaatccctaccacacttgagtgagttgcttaggaaaattgaggaccaatatgcaacacttgagaggcaagatgttttgctcattcgtgagaaaaagcggtgtcatgaactcaagagtgagcttgctaaggagagagagaaaaatgaggcattggtacagctttacaagcaaaccaaagagtctcatgctaatcttgaggtggcgaacgctcaacttcaagagagagtggatggcttggacaaagcatacctctctcttgaagagaagttcgaaaccttaaagaatagtgtctctctccctagcgagccatcttgttcaaaaattgtcccaagcgatgaaccatgtgtgaaatgcaaagatattgatattgaagcttgtgctactaactctatttctttgagtgctttgcaaaagcaaaatgagaagcttatgggactccttcacaatggcctacttaagtgccatatgggtagtaaggccctaaaggagtacctaggctatcaaagggacaacttcaaccatgagggtcttgggtatgttcctccaccaaaaggaaaggtggacaagagtgtgatgatcaagagtccctaaggtcttagcaattttgttaaggccaaaagtatccttactaatgattatgcttcacatggttcttttgatgcatcttatgttcttaggaagaatgctagtggttatgttgttgctaagtatgtaggcctaaggggcaagaatatttctatcaagagagtactttgggtgcctaaggcacttgttactaacatgagaggacccaagcaagtatgggtacctaaaactagaaattgatctcttgtaggaatatgtctccggtggaagaagttgggtgattgatagtggatgcaccaatcacatgaccagagaagaatcaatgttttcaactcttgatccaaatggcacttcacaagataacatagtcttcggggacgatgaaaagggaaaggttatgggattgggtaagattgcaatctctgatctttccattgccaacgttctcttggtaaaatctctaaactacaatcttttgtccgtttctcaattatgttctatgggttacaattgtctttttaccgatgttgatgtgaccgtctatagaaggaatgattcctcggtagtttttaagggtgttctcaagggagagctttaccttgtggatttttcctcaagtaaagccaaacatgagacatgcttagtggctaagtctaacacggggtggctttggcattggaggctagcccatgttggtatgaggaatctttacaagcttctaaagcacgatcacatccttggactaacaaatgttcaatttgagaaagatagggtgtgtagcgcgtgtcaagccggcaaacaaattggagcacatcaccccgtcaagaatgtgatgaccactacaagaccattagagcttctccacatggacctcttcgggccaattgcttatctaagcattggaggtaacaaatatggtcttgttattgttgatgacttttcacgcttcacgtgggtgttctttttgcatgacaagagtgagacacaagccatcttcaagaagtttgcaagaagagcacaaaacgagttcgacctcaagatcaagaacatttgaagcgacaacggcaaggagttcaagaacacgtgcatcgagagtttccatgatgaagaaggcatcaagcacgagttctcggctccatattcacctcaacaaaatggagtagcggagaggaagaataggactctcattgagatggcgaagatcatgttggatgagtacaagacatcggaccgtttttgggccgaagccgtcaacaccgcatgccacgccatcaaccgcctttatcttcaccgccttcttaagaagactccctatgagcttcttaccggtaacaaaccaaatgtctcttattttcgtgttttcggtagtaagtgttacattcttaataaaaaggctagatcctctaagttcgctcctaaagtgaatgagggattcttgcttgggtatgggtcaaatgaatgcacataccgcgttttcaacaaaacctccagtattgttgagatcgcgcgtgatgtgacatttgacgaaactaatggctctcaagtagagcaagttgaatcacatgtgttaggtgaagaggaggatccgagcgaagcaatcaaaagattggctcttggggacgtacgtcctagggagccacaacaaggagcctcttcctcaacacaagtagaaccacctacatcaacccaagccgacgatccctctacctcaagcttgaatcaaggtgaagaagacgagcaagttccaccctcaccgatcaacttagctcgcccaagaatccaccaaagtatccaaagagatcatcccaccgacaacatcttaggagacatcaacaagggagtatccactcgttctcatatgcaaatttttgtgagcattactcgtttgtgtcttctcttgaacctctaagggtggaagaagctcttaatgatccggattgggtaatggcgatgcaagaggagttgaacaatttcacctggaatgaagtgtggactttggtggagcgacctcggcaaaatgtgattggcacaaagtggatcttccgcaacaagcaagacgaggccggggtcgtaataaggaacaaggtgaggttagtggcgtaagggttcacccaaatcgaaggattagtttttggtgaaacttttgcgccggtagctagacttgagtcaattcgcatattgtttgcttttgctactaacctcaattttaagctatatcaaatggatgtcaaaagcacctttctcaacaggcctatcaacgagttggtatatgtggagcaatcaccgggcttcgaggatccaaaatatcccaaccacgtgtccaagctccataaggcactctacgggcttaagcaagcccctagagcttggtatgagtgtcttcgcaattttcttgtgaaaaacggctttgagatcgggaaagccgattcaactctttttactaaaaggcataataatgatatttttgtgtgccaaatatatgtcgatgacattatatttggttctactaacaagtcttttagtgaagagtttagtagaatgatgaccaagcgttttgagatgtccatgatgggtgaattgaagttcttcctcggccttcaaatcaagcaactcaaggaaggaactttcatttgccaaataaagtatttgaaggacatgctcaagaagtttggaatggagaatgcgaagccaatccacactcccatgccatcaaatggccacctcgacctcaatgagcaaggtaaagacgtcgaccaaaaggtatactgttccatcattggctcactcctttatctttgtgcatctaggcccgatattatgctttgtgtgtgcatgtgtgcaagatttcaagccgctccgaaggagtgtcactttgtggccgtgaagagaattcttagatacttagtgcacactcctaaccttagtctttggtatcctaagggagcgaggtttgatctcattggctacgccgatgcggattatgccgggtgcaaagtggataggaaaagcacatcgagtacttgccaattcttaggtaggtcccttgtttcttggtcttccaagaagcaaaactccgtcgccctatccactgccaaagcggaatatgtttcggcggggagttgttgtgctcaacttctttggatgaagcaaaccttgagagactatggcctaaatgtgtccaaaatcccactcctatgtgacaatgagagcgccattaagatagctaataaccccgtccaacattcccgaaccaaacacatagatattcgccatcatttcttgagagaccattccacaagaggcgacatagatatccaacatgtgagaaccgacaaacaattggcggatatgttcaccaagcctctagatgaagctaggttttgtgagttgagaagtgaactcaatatcttggattctcgaaacgtagcttgatcttttgcatacatttgtttttggtttctagtataggttactttactccttgtgataaaatgaacattcaattcatggatggacactagtcacatttttgtggatattttgaatctatgtgtatggggatctcatttttcaatgaatgttggtcctaacacaatttgcaatagattcgcacattccctctttcgagggtgaatcatcttgtctcatggtaattcactctcatttgatctttggatcatccatttgtcttgtggctattgttttgtgtggtttattgcgtgctagccataagctcaaatggggcctaaatgttcgaccattcttttcactccatctcctatcaaaggtttgcaaattgctttcatcaaaattcccggtgcaaattcccttgaaaaaaattgttttggaagttccgaaaatcccttttattgcactccaacgggcagatttgtgatgtgggtataaatacccacctcccctcacttgtgagggctgctggttccattccaattatttgtgccattggcttgctctctctctctctctagttcatttgagccttgcttcctcgattcatctctccacccgtgtttgatttggatttggtgtgtgtgtgagagtgtggattcgagtttgtgtgggtggttcttgtggtctttgtgaagatttgtgagcacttgcatcatctctgggagttctttgcatcatcttttactcttggaggttgaggactcctagacggctaggtgtcactcccgagccaccgatctacttgtggttggccgggagaagtttgtgaaggtcggatctcgcctccgcaagggaagagatacctcttagtggaaggaggagtgcttagtgcaacctcttgaggaaagagttagctaagacccggctcttagtgagctcctcaacggagagtagaatcccctcaaggatttgaactccgggaacaagtttgcaagcttcaccttggtgatatctcttcatccctctcctctaactttgcttgcttgtgccgctattggtctagttgctgtatgtgccttggattacatgtggtagacttctagatctagatacttctttttgtgtgcgctgctagctctgtgcattttcggaagttccgaaaattcccagcctagttccgaaaattactgcttctactttacttaagtttttaaattagcctattcaccccccctctaggcctaattgaccttttcactttatcctgatatctttagttttgttttgtagctagcatatacgtgggtttatatcagctatttcttttttttatttatcactcatgtgtcacacatcaatttcttttctttcatttatcactcctttgtcacatcataatagaaccacctatttcttcattttggttttctatcttgctcttagagatcgtcggaccatagcatacttatgttatatttaaatataccacatagttttcatccatctagtactcatccattgcaccatgatttgatcacttccatcatcatctctccacgttctatttattctcaaaggtcattagttgttcgagctatttattcatataatctatttctttctatttatttatcacttcttcaccgtaccatagttgaaccacttttcttttcttttcaatattttatcttattattacatatcatcgagccataccaaacgtgcgttagatttagattagtatatcttttcatattcatcactcctccatgatttaaccacttgcatcctcattccatattttatccatttttagatattgtcaaaccttcaggcaattacatggccttatatcatctatcccttttgattcatttgtcactcattcatcatactagagttgaatctcctatatcttctttttaatatgttatcttattctttcaggtcatcagatcatatcacacttacattagatttagatctgctatatcttttcgttcagttatcactccttcgtcacattatgatatgatttgaatacttttctcttattccatgttttatttattcttagaggccatcaaacctttgagcacttacatgagcttatttcttatatttttctcttattcattatcgctccctcatcataccatagtttggttatttggtttatcgttctatgttctatactattcttagaggtcgttaaatatcatgacatttatgtttgggtggtcagactgggtagcccgactgtcagactggtagacttcgagggagagtcggtttcgggttattttcgtggaatttctagattgcttcatgtttatgactttcagatggttcctattcgtatatgatactattgtgtgctgatgtgagtcaagttggtgcgaacttgtactcgaatatggaggagtataaccgatgatagatcaggactaggcttaggagaagttgaggtccagacggtcaaagatatcatgtgggatgctcggactagagaacaatgcatatggaggttaaggtttccatatggcatacacatggtgttgtgcgcgtatggaaaaatgagtcaaatttgattggagtctaagtttaggaatattggagtgtggaattctatggggatgttgtttccctgttttggtatgtttcctatgtgattagaagtcttagttctagttggattcgtggctagagacaaccacattatgggtataaatagaagatggcttgaggctaggagagatcatcttttggagagaaaaattagggtttgcttcgatgtttcaatcctagtttgtgagttgagagaggagtgatttagatgcactttgtaaacacatattgatgcaataaagttaatctactttcaagagtttcgttgatacgcttttttctggattccgacaatcagaccgacatttaatgagtggtttaaccagcgggaccgacatttaacgagcggtctaaccaacgggtagtccaataggtgtcaaggaggtagtcagactagtgacgtgcaaaagtgtaatagccctccctccagaatagcatagccatcccattcgacggacgagcccacttacacataccaccccacttacactttcatccttgtttcgtgtaaaaggtaaacccaggagtggcatggttggagggaagaggatttataagttggttccaactttgctaactaaacaagcacatatctctcatgggcaacacaggccaaatcctaattggaccaggatgtcacatacccccaccccccgccacataggccaaatcctaattaggccaggatatcacatatacccccttcaaaggacccgatgtcctcatcggcccaacttatccaggggcgggcccactataattcgtgggtattcaaatgaatacccaagatttttgaacaaaaaatacatatatgaagtatatattccatatatgtatatataggaaaaaagaaaaatacctatacccattcaaaacttaaaagaagcccaaactgaaccctcccaccacccaccattttaggtccattgacccaatagcaaataaaagcccacatttctaaccctatttcttctcctcacctccccttcccatcccaaccggccaaccctccccaccccagccgccggccgccaggcgccctgcccaggccgacgtgcacgcgccggtgccttgcgccgtcaccgtgccagcccagccgcctgcgcgcaaacttttatttctgctaaaagttttggtttttttaatgttcctaccgttcactattctctgatatgcttgttttttttatattcaagcatataactcggtgctaagctcgaggttcagttttgactatagttttaaacacggtttaattataaaataaattttgtgagaggatcagaacgtcagattttcagtacttccctctgctccgcattccgtctcggctcaactgccctcgaggccaagcaaaagcccccgtcgctcttgactctctctctctctctctcgctcgcgacaagcagcatgtccccacacgcgcacaacaatcgcaaccgcaagccaccttgctctgcttgctactctcgttgttggcgcggcgcggcccggccttggggggggatggatggggatgtggctggggtgggagtgggagcagccatagatttcctcctcctcctcctcccttagccgccaccaccacctccctccaccaccatgccgtcaccatcccagccgtcctcctcctcctcccccaagcttctcaaccctagccgcaacgcaaaccctccactcctcctctccccttagcccccccctaacgccgccgcaaattaaccgacgtcgacgatgatgcagactgccgggcgccgccgccaccgatgggtcaaggagtggtccgttcctctttcctcctcgaattccaatcccttcttctaatgggagagagcttcttgttggtttgattcggattcggatctgatctctcgtccgcgccacgcgcttatacatgttgttagggttccgcaggatctggtcgtcgccggtggcccatgcgcgctctacaaatgggtgcgaggtacgccccgccctcttcaattttttgctttgcctccccgccctgttactactttgctatgtgcggtttatcgtccgtatgctcgcgcgtgatgttatcatgcgcgatgggatcccttgcagttgccggctgcttgaattccatgggaggttggtttatcagagaggacctgtttaggcattttttttctgaattggcccctcccctggctagctttaccgcaggggagctatgcgatttgcttggcctgtgactttgtgacagctttgacggtaattagtacgcgttctaaacagctaatggatgtatggattatttgtgcaacgctcttggaagtacgatttcttaaaaaaaaaaaagaagctcttggaagtacaatttgtttttaaaaaaaagctttctacatcagcattgtttagataagtttttctaagctttttgctagctttatactccctccatttacttttgataggcatatttccaaatctgaaaattttatttttcataagcatatttcaatccaacaacctatcctcttaatgactttctcagatttaatgcgtgactctccattcttccacacaagattgactacatgggcatcgagaaatgtaaatattaatgaatcgcttgtttacgaggaataactagtagcatgcttaaatggatgataagtagaattacttatctttggtctgtgtaccaagatgaaatatgaccatcaaaagtagatggagtgagtaatatttaatccatccatatgagcaattttcctctgtctgtctatgatctatccaatcacccagttaaaacgcgcccttagttcgctttcggttttcatgctgtccgttcattactgtatggcataagcattgcagtccaagtacctgggactgcgaggcacaggtgtagtccttttgacttttggaatagtgagatttactatgttttttttatcatttccaaatttcagaccctataaaccaatttgttctagtaaataaataacttgatctgagataaatgtagcgaacaattgaaattttgtcaaacgtttttttagcgagttacaagtatatcttttgaccaatatcccatgcctttgcagtctgcactacatctgagcttcacttcgacatatttatgagcagtgtagagttctcattcggcatgtccaaccaataaggatactaaactagttgaattcatttgttgggcttgggcatgccttttgttctgtgaactaccctttcagctgttaatattttcaccttatttctttacagaggataggttgtcagctctcaaatccagggacaaggaacaagaagcagaactggcaaaacctgaaccaaccaccgaggttctcttcctgtgcagctatgagggctgcgggaaaacttttgttgatgcaggggctcttaggaaacatgctcatgttcacggggagaggcagtatgtgtgtcactatgccggttgcgacaaggtactgcctgtaatctttcttgcctgcgttggcctttctggatcactatggcattgctgcttctgggttgttcgctaatgttattttctttttgaatctgactttgcagaaatttttagacagctctaagctgaagaggcattttcttattcatacaggagagaagaactttgtctgccctcatgaaggctgtggaaaggtaattaatatgatctctccattgtaaactttgtcattcatttctattccttgactgcattttccgtacgatgcataaatttcaaatacatgttaaatagtccatatggagtggcatatcaacacttattccctttctctaatagtattgagtttttttgggccatgcttggatatggtcaaacattctaattatggaataaaccccccaccccctttggcattatcggtaattgttgctgttaatttgttaggttttggtatgtttcttgttaacatatttggtcctggttattgcaggctttctcattggattttaatttaaaggcacacatgaaaacacattctgtggataactatcatgtgtgcaagtacccagaatgtgctcgaaggtttacacaggaatcaaaattaagggctcatatcaagcaacagcatgaaaaggtaagatctaattatacctccagatttgtgcttaggaaggaaccagttctgaccacttactttcataacactgatatagggtggtctccagaatccaggtgggtctgcaacaaaccgcagtggtctagcagaccactcccataatagtcacacaccgaaaccgtcagcagctccacccactccctcagctgatcgcccatacgtctgtccttatgatggttgtgccaaggcatacattcatgagtacaaacttaacctccatctgaagaaagagcaccctaatcactaccaggatgccggtgctcaagccgcctcttcgaagatgtcgaagcgaagaagcaagccctccttgacggccaagatgccactgcccaaggtccctaagcgcaggggttacacagagccataccaacctcctgttagtgttgtcgaagagcaccagtggccgaggaatgtgctgtacgaggacgatagcgaggagactgaggaagagggagataatgttggggacggggcgaggtacagagctgctagcagcgacgacgatgaggagactgaggacgaagaatgagctgctcagatcagtcgttttttcatccagtgcttgtgcatatgatttacaaaatcttagcttttgggttatagttttgcatacatgtacaatattcaaaataaggctgggtagttggtcagaattgagaattaccccccttccttctgaattatgcaggttggtaatgttgggctgctcccattaatcaaattcaaaaggacaatcacagaatacaatcattgtttgcaaccttttatgctttcacctgcttttttcaagaggtattggaccaaactaacaatgcttcgatgtgcttaccaatgttgaagaatcacagctttcttccacctgacacggccgtggtaattcaacctttgccgtgcatacgtgcaatgcaatgccgttcggacacggtggtttcggcccacagctattatttatgtctgtttgtgctggctttgagcccactattttaaattgaggattggacccattgaatccagtagaaactatactttctatataggttatacaattattataagttaaagctcaacatacaagtatatcaactcatcatcattagctattacttcctccgtttcacaatgtaagtagcatttcccatatataagtagcatttcccatatatgaatgtggaaaatgctagaatgacttacattatgaaatggaaggagtactttctccgtctaaaaatatagcaacttagtatgggatttgactcaacttaagacaatgaatttttatgggtcaaatctcatcctagattacaaaattttagaacagatgtagtagcatcttaaattttgtacaagcatgacacgttatcttctccctacgtcattttcataatgtttcaatattcaatatcgtgcaatatttcacgtatacccatcataaattccaaagcaaagcaggtgtatcacctaattttaacataaggttcagcctaacgaaaagttttcttctgtttctcttctcgagtttatgtgtttctcaaatttcatttttttttctgcagtctaatcaggcactagttatttctgtattatttacaatcctttgtttttttttctattccttcattttctttctcaaacttgcatttgaaagcggttatcggtccggggcggagacacataattagggattgaacatcaggcttgtttcctttaatcccttgtaaatcctttaaaaaatcatgaaaagttttgaggattcaacaaattgcattggttgaggtctttattgattgattcagtcctagtattttttgtaaattcctagctcccgtcaatgtatcggtccagtgcttaattatgcttctaacctgtcggcagtgtgcccgattcggtgcaagttctttgcctttgcttatgttgactcctaccgcgtcgtaaggtcactttgattcgtgccaactgccaaagtgttgaccacgatgtactagagaatagtactactacagtggtattttattgtacacaaccgaagctgggggctgcagcgtgcagtcaagttggggaaattctttttcttcgattatcacatcggatatacagatacacatttaaagtattaaacgtaggctaataataaaataaattacagattccactagaaaactgtgagacgaatttattaagtctaattaatccgtcgttagtaaatgtttactgtccacattgtcaaattatagcgtaattagcttaaaagattcgtctcgcaatttacacgcaatatatgtaattatttttttcctacatttaacactccatgcatgtgtccaaacattcaatgtgacagcgtgaaaatttttgttttgggaactaaacagggcctgagccattgatcagcgccgaacaggagggttcccgagttccgacaactcgcattaggccttgtttagttgggaaaaattttaggtttggttgtcacatcggattatacgtagacacatttaaagtattaaacgtagtctaataacaaaacaaattacatattctgccagaaaactgcgagacaaatatattaagcctaattaatctatcattagtaaatgtttactgtagcatcacattatcaaatcatggttcaattaagcttaaaagattcgtctcgcaatttacacgcaaatatgtgtaattgatttttttccctacatttaatattttatgtatgcgtttgatgtgacaacgtaaaatttttgttttatgaactatacagggcctggcatgatcatgatcgcgtcgttaagctcaccgatcccaagatagccacgaagacaaggcgaaggttccaacagcgcgttggttggaaacggtaataaagaaacccacgtcgttcctgcaataccctcacactctccttcctttttctttaggactactcatggtcggggatgaattaagcagtgatagcgtattatgaccaatgcagttaaaataacgactacaactttagcagtgatagcatattatgaccgttggatcgatgcagccaacagcttggatctactctgccatcccctgcatagtatacgctacagtgattcgtgaacagtattttctgatgatctgagccgctgtttttgatccatcggctaccttgcaactactaaagttgcagtgatagtaacaactgcactggatctcaatccgtcggagatgccatggtagtttttttttctttataaacacagaacatagacaacgcacaacacgacacacttatttatatgaacatacacacgcatatccagatatatcttgattcattatactaagaggggacacattctaagttggctttttttttattggatggagtacattcatcctaattcataacttagttgaaggtcccgtttggtaggactccaaactcctactccaatagaatctagctcctgttggaggttggagacctgttgaaaaatgtttggctagcttttagctctagatctaaaaaaattaaaaaaaaatagaatccccaccaacggtcgtgcgccaccagcgcgtcctccccactcgcgccagctgctcgcactgctcgcctgcccccgtcggagcatcgccgttggcttgccgtctgtgctcgcccatgggaggtgaagtttcaagagggatagagaggggtgaggaggtgagttttgggtagttctgtagcgtttgtgtgtaaatatgctaaaaaaaattgaaggcagtgggtcttttgggttggaatggagctatggagcaataaaaacccagctccacctcgtagtccatatttaaggagtagctctgctaacttcactcctaaaaacataggatctaaaccatttggcacaactccggcttaaagctggagttaagagctagagttgtgccaaacatgccgaaaatgtgctctctctctctctcctctcattaacccatatcactcaactgttttgtacttagatgattatttacggtccaaattatccacttattttcttcttttattaagtcatatcacctcaattgtttttagctcttagatgattaatctatgatccaaactatctccctccttttcttctctcataaaactacatcaacttacttttacatttgaatcattattttatatactatttaaatttaaattattataaaccacataaacttacgcaagattatattatctagctatcttacacaatatttttactcggtgttatcatattaaacttttgcagcaacgcgcgaggttcacctagttatacttgtagcaaaatcatcttgattaatgatctattgagtagtgttttatagttaaatggaaagaaatgtgagaggatggttttatactcttatgacataagaaggcttaatccatcctttggtgaagagaacaatatgaaagacatattattctcttcaataccaaacagaagtacatgacacacaattgactttttttttctcaaactatgataagcaatatttatcaatcacttagaagaataccattggatccaccgtcaaaagtactttgggcaatgcccagtatgtatattcaatcgctattggccgactataatataatcaaccacaacgaaaaaggtttttatcctcgcaaaaaatggttttatttgattatatttatatttgtgttattaccgctataataaaatcagtgaacaattcactacaagaagaatgatgaagtacatgctctttctttgcaagtgcactgtgcacataaatagctaggtgcccaataatcctcctatggtcatgaataatgttggtaccattaagatgacaaaaaaaaacatggatcggccgttatatattgagcaaaatggccagaatggaaaaggaccttttatatattgtcttgcgtgatgaaatggcacgaggtatcgacaagtattctattaatataataatgaagaacaaatcttaaaaatctaaaagtgacatttttaacaaaaagtgaaataccatgtagggacactggaaaaagaaaactatacaagtagatacgaacaatcaactgtacaatgaaaaaagttgaaaaatactctagtactataacaacgagtttgatgaaaacacaaaatatccacaattcaagaaatattcaaaggataaagtaaaaggaaaaaaaaggaaaaatgctatttatttgtagtataagtttactacatgtaacctttgtcacactatatcacataggcagctatttaattaccaatagaaattatactattctatattttgttaatccatttacataaatactacacgtctaatgttctacttaaatacctaccacacttgcacaaaacttcttatataacttatcaatattcattacttaccctgtctcaaaatatagctacctaatatagaatgtgacattatctacactactagaaaactgatctttactcggtcgccccaaaaccacaatagtcccggttacaaaaagaaccgggactaaagatcctctttagtcccggtttaaaatcccacagccattctacgatctttagtcccggtaacaccaaccgggactaaagatagtcccggttcatcccctgtcagtcccttgtcagaggggcggggatctttagtcccggttggtgtcacaaaccgggactaaagatcatcactttagtcccggttgggatcttctagatctttactccaaatcatgcgtagtatataatccatattccctatccactcaccaacaaccggcctcttctctcctcagatgcatcaccctttcctcttcctcctcccatcccggccttctcctccccctcctcccctcccatccgactcctcccttcccatccgatctctcctcagatccatctccctctcctcctcctccccttcctcctcccatcccggccctctcctccccctcctccccttcttcctcccatcccggcaagggccgcctcctcccttcccgtgcccagcaggaccgcacgcggcaggcagccggcggggccgcacgcagcaggcgccgcgcaaggccgagtagcgagcggcggcaggtggcgctaccggcatccattatttcttttctatttttttacaatttgtgattcactgagatgtataattttgtgatttgttgtatggatctgagatgtataatatgtgatgtatttgatttgtgtgtaattttttttttaagatttgtgatgtatttgatttgtgtgtacaagtaacttaagatttgtgatgtgaatattttgggatgttattttgatttggggtttgatttggatatgcatcccactcgatttgagaggaaatatagggattaaactctggctaaaaaacaatgaaaaaaagaaaaggagacctaatggaactgccgctaccctctctttagtcccgtttagtcccggttggtgttaccaaccgggattaaagatccatctttagtcccggttatttcaaccgggactaaagatctttaggcccatctttagtcccggttggaaaaccgggactaaagggggttgccaaccgggagtataaatggtttctccaccagtgctaccactacgaagctgtccagatttgttgtactacctcctatccagattcgtaggactagataatatcacatcctatactaggtagttacattttgggacggagaaagtaatatgtttactaatcgacccctccgtaagacattgcacgttttataaggctgagttctttctcataggttcccaactccactctctcgttttccgcgcgcacgcttttcaaactactaaacggtgcgtttttacaaaaaaaattctatatgaaagttactttttttaaaaaaatcaaattaatctatttttttttaaaaaaatactaatacttaattaaccacgcgctaatagacccctcgtgcataggacatgtgttcctaaccgaaactagcgaacacagccttaggccctatttgggggagcttgtcccagctgcagctttttacaaaagctgcttctgctagaagctaccccaaacaatgcacagcttctgagaatatgtagttacagattctaaaaaatgaactaagaaaccagaagctggagaagctgggtttcagggcttttccagatttttagaaactggctgtcaaacaactgcttctcaaaatctaaagttccacaaacaggcccttaccctcaaccggcgagaggtgcctctcctcaaaacctcctcaaccccatcaaccatctcgctcctccatgcaggaagtcagcaacaccagttgatgacaccaacacacaagacatttgataatttaatattttttccagtgtccaatttattttaattaaaacttataggattgatactctatccgtaaaaaaaagaaaaacctaaaacacgctgtgaccaggatgtaacctctcttaatgtaacgaatttggataaatcatatccccttttagattattttttttatggaggaaatacatgagaccatctgagtgaatgaaagtgggttaaaatgtaaaacaatcgaagcccgtttcaagcagtgttaaattattaataaatgtaaaaaaaagagagaaacaaaacgaacagcccgggagaggataaaaaaacaaaaagaaagaaaaaaaaatactagtactagtagtagtactctcgtaataataacacaataggaggagcagagaggagagagccactgcaccgcgcgtccgcccgcgctccctccctctcctctcctcgcactcgccgtccctcccaatggcctccgctgccgcccacgcggccaccgccaccgccgccgccgtcctcctcgtcgtcttcctcgccccccttgccgccgcctccgactccgaccacaaggtaaaaaaccaaccagctcctcctcccacttcaccgcctcgctgggaacaacagacggggggcgcgcgcttcggcgtcggaacactcggtcgccacccacccggcggcgacggggtctgttcgggccgccgtggcggggacgtgtgcgccgtggttccgctagatccgtgctcgcccgggtgggagggtcagatctgcgtggcgcgggctccggcggggcgggatctccgggtagccagtccctccctcgtgctggatcggggtctcgtcgcgtggtctctgctagagatctcgccgcgcgagtggtgagaaatggaggggttgcaatgcgagagttcgtctctatcggcatccgtggtccttctgaaagtttgactcgtttgatctgtaacgtctagtgcagttagtctgactgtaatgtttggtcttgcggtaattaactcaggatttaggtgatattttggcctactgtgtattttggaggaagaatgtgtttgtctggtgctttggaacatttacgatgtgtcgtgttcttcgctttgtgtagtaccaatcggaggagaaggttatgctctgggtgaacaaggttggcccgtacaacaacccacaggaaacttacaactactacagccttccgttttgccatccgtccaataaccccgtgcataaatggggagggcttggggaggttctcggtggaaatgagctgattgacagccagatcgacataaagtttggaagtgagcaatcacttttgttgtgcattgttctttttatgctgcttcagttttgaacattgaaacgggaaggtaaaatgcagtgtttaagactgatcatggtttgtctcaggggatgttgacaagggtaccatttgttcaattgaacttgatcctgacaaggccaaacagttatctgatgcgattgagagttcatattggtttgaattcttcattggtaagctgttctggtttccttcttgactccgctggtgtgtttacttgccatttttcagtacgcataaacatttttacgcactgtgacttattgatttacttattatccttttctgcacacttctgggaaattctatgccactatcaaagatgatttgcctctatggggtatgtatcctcttttatcattactattttctctcaaagatcttatatatagtctaataacttataacttaacaggttttgttggagaggcagacagaaatagcgataacaaatatttccttttcactcacaagaacatcgtcatcagatacaatggcaatcaggtttgggtttcatgaacttgcatttattccttcgcaggaccttcaagaaactgagtattactactgttacattcctgtagattattcatgttaatcttactcaagaaagtccaaagcttattgatgcgggtaaggcattggatatgacatattctgtcaagtgggaaccaaccaatgtaacatttgctcaccgctttgatgtataccttgactaccctttctttgaacaccaggtaagaactcagtttctgcaattaaagcctggttctgcaccttggttcttatgtattttgttgccaattttccacataaaaaattatgccttgattctcaatttcccatgtatatcttgcagcatttcctctgaccacagataatccattttatggcagatccattggttctcaatcttcaattctttcatgatggttatctttctcactgggctagtgtcaatgattttgatgcgcactctaagaaatgactatgcaaagtatgcccgcgacgatgatgatcttgaaactctggtgattgactatctatattcaaataatgtacaaattctgttatgcgcttcatacatcctcttgctgacatttttattcaatatcaggaaagagatgtcagtgaagaatctggatggaagcttgtccatggggatgttttccggcctcctcgcagtttggctcttctttcagcccttgttggtgttggcacacagttgtctgctcttattctgctagtgattttgttggcaatcatcggaatgctgtatattgggtatgcacatcatttatgatttacctcaaatcactacaattaacaccgatttctataaaggcagcttctactaaatgccttaggcccctaagttttctccatcctgtcacttgttacttttgtcaagccaaacagcatacaccacctccagtttaaaatacacaatttgttaacgtagacaggactgcattggttttcgcagtaaggctttccagattctaggtgtgcctgaatgtgtggttataactacaatcacattatgacatgtgaggaattgtcaaatcataattaccgccttcacatgaaacccagcccccttttctaattttcggcctgtcaatgaactgcttaaaaggttctttggagtgcacatttatctttatttttgatattttgcttttatttcacaagtagctgaactactttatgaagcatttaagtctaatcgtactttctgattctatgcaaaagcgcatctctcacaccttatattcttattgtaggcgaggagctattgtcacaacattcattgtttgttatgcccttacttcattcatctctggatatgtcagtggtgcactttattcacggcatgggggtatgaactcagtttactttacatcttgaacaggcacacacctattttactataagatgctcacctcatttaaatccttggtttgctgagcagggaaaaactggatcaaggcaatgattatgacagcatcactatttccgtttatgtgctttggaattggcctagtgcttaacacaatcgctatattctatcgatcattagctgccataccatttggtactatggtggttgtgttcatcctgtgggccttcatatctttccctcttgctcttttgggaactgttgttggtagaaactggagtggtgccccaaataatccatgcagagtaaagactattcctcgccctatccctgagaagaaatggtacctcacgccttctgtcattgccctcatgggaggactgcttccttttggtagcatcttcattgagatgtactttgtcttcacatcattttggaactacaaggtaaaacaggcaacactaattttcccatacaggcttcattactaaggagccctgagagttgagacttatgcatccttcctgatcatctattgacaggtgtactatgtatatgggttcatgttgctagtctttttgatcctcataattgtcaccatctgtgtaacaatcgttggtacatatttcctgctgaatgcggagaactaccactggcagtggacttcattcttctctgctgcttctactgccgtctatgtttacctctactccgtatattattaccatgtgaagaccaagatgtcaggattctttcagacaagtttctacttcggctacactcttatgttctgcctaggtttaggaacactctgcggtaagctcttctacaccggtagcatgcttaaacccaagaatttgatggtttcaactgataccggttcgaattttggtccaggtgctgtcgggtatcttggatcgacactgtttgtgagaaggatctacaggaacataaagtgtgactaaaaattgaccccggtttagacagatggggcgaaaaactttgtatgtgtggcttgttccgtgaagtgatcagccatgttttggtggccaagaagccagggcagtttatggagtacaaacgttcttcggcgacattgctgggatgccatggtttttgttttcttgtcccttttgttctctttgatccccctctcggtgccacaattttcatgttcaactagccatatatagctgcgatcatagtttagatgttagtatataccagagttgttattcttgagcctcatatctgtgttgcttcacttaaagctgtaagatccatgacatttgttgacctttaatgatgaaaacatctccgaaagacatcattttcagattttatgcttgtgttttcctgcacgcagagctacagaaaaaagaagcttagcagatacacatctattatcattgaaaaatagcacaacatctgaacataaaatctattagtacatactagaccattgtgtaacaaaatttcctgataaaaagaggggaatatttcatatgctactgtgatttgcacaactcaagtatcttgcaaaatatggaataagttggaaaaccagtgcctgatttcatactagtagtaaaataaacctggagttcattatactgataccccttttaccatgtgcccaacacccgtgataagtctggaatgcaaaagattctacaccaaattcgtacagtagtactagtaatcgtttatttttcgtacaaaatcatggtgaaataaatcgaattcaaggacaaacgtcagctgaaggattcaaattcgtttgcgagtctcttcgtttttacgtggcgcgccaaggctcaaacttctttgcacctctgttctgaacgcaaggtgtccgccatggcgcccgcgctcccccgccgcctcctcccctggctccggaccccaccttcctcctcctccgccgccgccttctcgtcggcgccctcccgaggctgcccgctccacgccgcgctcgcccgccgcggcgccccggcggccgcctccctcgccctgtacgcccgcatccgcgaggaggcatcgccgcccaccccgttcaccttctccctcctcctcgccgccctcgcgtcgtcgtcgtcgtcttccccgtccccttctccgtccgcaggctgcgcgcgcctcgccgccgcgtgcctcgcccacgctcaggcgttcaagtgcggcgcgctcgcgcaccccgtcgtcaccaactccctcctcaagctctactgctcgctgggcctcctcgaccgcgcgcgcagggtgctctactccggtggtgccgcgctggacgtcgtctcgtggaacacgatggtgtccgggtacggcaagggcggggacctgggcgctgcgcgggaggtgttcgccagaatgcccgagcggaacctggtttcctggagtgccatggtggacgcgtgcgtgcgtgccggggagtttggggaggctttatgggtgttcgatcggatgatgcgggaggaattcaggccagatgtggtggtgctggtgagcgtgctcaaggcatgcgcgcatctcggcgccgttgaaagggggcgttgggttcataggtatctggagacagggagttttggaggtaggcgtggaaatctcatgcttgagacagctcttgtggacatgtactgcaaatgtgggtgcatggaggatgcctggcaagttttcgatggagttcatcgtcgcgatgtggtgttgtggaatgcgatgatcggtgggcttgcgatgaatggctatggtgagcgtgctctcgaattattccgaaggatgcttcagaagggtttcatgccaaatgagtcgacgtttattgctgttttatgtgcatgcacccatacagggcgtgtggacgaagggaaaagggttttcaagtccatgcaggattatggcattaagccacaaagggagcactatggatgcttagctgatctccttggccgtgcagggaatgtagaagaagctgaagctctgttactggatatgccaatggagccacatgcttctcaatggggtgcactcatgtcatcatgccaaatgcacaatgacatcaatgtgggtgagcgtgtgggtaagcggcttattgagctagagccatatgatggtggccgttatgttgttctattcaacctatatgctgtcaatggtcgatgggaagaagcaaggaccattcggcagatgatggaggataggggagccaagaaagaaacaggtttgagcttcatagagttaaatggtttggtccatgaatttatttccggggatacaagacatcctctcacaaggaaaatctatgcactattggaagatatagagaggagattgcaactaattggctatgttaaggatacaagccaggtgattatggacatggatgatgaggaagataagggcatcgccctatcctaccacagcgagaggctggcattagcatttggtatcttaaacattccccagggcgttcctattcgtattgtcaagaaccttcgagtgtgccgtgattgccatgtgcattccaagcttgtgtccaagctctacgagcgggagatcattgtgcgtgaccgtcatcgtttccatgtgtttcgtgatggagtatgctcatgcaatgactattggtgaaaaagattttacattattgagtatgattggaatcatggacatcgtcaaaggatggccaaaatactggccaaggtatttatggtcgatatatcagtaaccaaggtgagtatggagaaaaccataatagacttcctttgcagtttgcacagactgttcttcaataccacctttgccatgatatagtgcttattttctgtgaaatgatgaatactgcaattgattttatcttttagtttgcttcaaattgttattccctgtcttatgaagattgtaggcatattaatcctcttttaaaatggtggatggaactatgatgaactttcgtgcaggtggtggtaactaatgaactctcaggtctatcaatatttatgtgttttgtttttaattgctaaaccatctgaattgatatattgttaattgtgaaatcctcaaaacaaaatggctactttccattagcaccattactgaattttacaaatttgatgcagttcgttattgagtctcaactgttactagaattctttctactcactctatcttgttattaggtttgccaacgcctcttgggtggatctgtttgaaactgtaagagaacaagatcagtagatcactgttctttctggagtatcaggataatcagtgtaggcggaggccgtttcttgcagagctgattagtttcttttcaagcttgtttgcctgaactccaagggatagaaacgagtggacacgctcgccatcttggactgatcactgattgcgtgctgacggttgacattttccatcggtgatcactattctcatcttcttaatctgccaatcaagttcaaattcccaagccacacctcgtttcttcttcaggtaggtggattgactggttgttgttttttttttcagacgatggaactcgcgcgctttcggtgtcaggggaatggcgggaaggcagacgatggaatccaagagatggaggaggagcttccagaacccctcgcttccacactgaagctctcccctttgctttgctttcctcactccatatgtgattccttccttttccacctccacccaaaaactttccacccactccacctcttcatcacacccactctctctttctttctaatggattactcgggcggcgggccggcgccggcgccggcgacggggagagcgcgggtgcgggggcggtggtgctactgccgctgcttccggcggtggggccgctgcttctgctgctgctactgctgcaactccttcccccccatccaggacgacctccgcggccccgccaccgccgccacctgagccccacgccctacagagatttcgcccccaacacttcctaccacctaccgtaccaggtgagtctactcgcggcacacgcttcgtgatttgtttagatagctagctattccgtgtgcttggtgtggtcagggtgtgtgtccatctctgttcgatcgctcccccaaactaggtttagcgtgtggatattccgtagcccccctgatcgggtgcttggataattgggatgtagcgtgctgtctcgtaacgtaaggctcatcacgtgagccgtgatcattgtgctgggtttgtgctgggatcatgggattgatgaacagtttggttgttccgtgcactccggatctaggtttcagtgcactgcacgggtggggaccgtccagaggagctcctccgcgttcctgcgtgagatgctgaaattgcttgtggcgaaacgctggatggtgaattgagttgtctggggttgttcttgtcgggttggtaattttgttgtcctgtgatttgagtagcgtcttagtggtgcagattttgtaggctggtgaaacagaattagcaagccttgggttcatacctgcgctgtttggacgctattgcgattaatttaaaattttatatgcctcatattagttgatgccaatgcatgcttttgatttggttgctgtctaggcacaagacaacgtagtactttgaactagtgcgtcttgattatgtgccggagacataccatgtgttctgttgagtctaaattaggttcatcaagagaaaatgagcaattgatgcagaatgtcaggcacaatattttacctgttagtatttgttagcattgggtgctggtatttgcctcgtatttacatcagtacatgctacacgatcatctattagtttaagattgtcacatttttaagagaatattatgtccgttcttgattagctggtatatactattagttatattgggatgttggattttgctttcgtgcatatgtattcgtacaaactcatccacttatatgttccataaatttgattaattattggtttgaccttactattcatggcagcagacacgttaatcatgtaatcaaatggtcgccatgaggactgcaccaacctttgttgctatataaactaggcaagactacctttctgttcagatgtgagggtatgctaatattcaggagttattttggacaattactggacaagagatgttcttggtagctgtttaaagtacttgcttgtaagtttagtgaaaagtccatggacatattgctttacggtaaatctgtgaggatggatcaagtgatcatttccatggacagcagagtgtttcctgtaatatataacaactatacatatatgaaaattacttgtacataaagtgaattatatctgctgtttcattctcaagtatttactatgagctttcacatcctggtacaaccatagtgaattatatctgctgtttctgatctgtcttgtgattacaagtgttttactcgttctgttgcagctgagaatgaactttcttgattccaccatcatatatatctgatgcgtgacatgctcatacataataagcattctgagatctgtacatatacaagagtacaaatgtagcatgtggttggtgctgtgtgatgtgcagtaacagatacttgccatataaatcgttgatgcaatctaatatggtttgtattattatgtcggtgtccatctgaaacccatgggctatggccctctcctggtgtttgttgtgcagacatcttttcctatttgcacttgggacatttctgaactgtcaggtgcagtttccctgttacatattcgatgcatcctccgatgactattgagaagattgtgtcaaatctttatagttgttattgtttcctaccaggcactaaatctccctgtttatgtgtttgagtcggtttgtcttgcagtgagggttcattttctggctagtcttttctgatgatctctagtgcagttgaaacgtcagtagcagatagcagatctgctaatcgcaacatcagcaacaaaccagcttcagcctcttcttcctcaacagtgaccctgaggtgacattttacacttttgcatcactttgttcaaactgaaacccttgacataggtttaggtttatctgaaactttttgcattcccctcggcctcgctgtttacggattgatgctactatttcttttttttttttgcagctcctacacacggatacaagatgtgttgcatcctgccatgacctcacacgagcaaagcaccaaattagccaatatcatggcacacgcagggctgtctgctggttgcatggatcagggcaagagagaaaccaagtgtgtgggggcattggatgcctgcctgcctgcttgctttgcttgctgcatcccccctcacctcaccttcccctctcttgttgactgtggtgtatgcacaccttgtctcgtgtaattatggtctctaagccctgcccgcaactactggtctttacatctcattcttgatctcacacatactcacatctcattcttgcatcgccatctatctttacactattctctgactgcattctcagcacccatctatctcaatatctcatcatgtttgtattacaaagtactactaacattcttgtatgtaactgcagtcatccgtctccacagcttctgtttacagttctgaacttttacagtatctccatggttactgtcacaccagaggagcgtacaagtagtggaggtggagtactcccttggctgcctgaactgatgagatgagcggggccatgaaagctggaagctagcactggtgagagaccaaccaaccctgcaaccatgccctcctgcttgctctgcagcatcaaactctgcccctgcttgcctgaacaaaagtgagttctttgctcacctttgggcacacactcacacatgtggtcaataaggcacagaaagttcctgcatttcttgtctacttctggttactgaggagtaccttgcctgctctctggggtcaacttgttttagtgaaagagatagagaagagtgtgtgactgtcagtcagtcaggttatggggcttgtgatagatgatggatggggtgttgtggtcatggctggctggctgggctgtggagatctttccatggcagccttgcctgtgatcttggctgcagggcagggtggctcagttcctacctgtactgctgttgctcccagccccagagtcaacaagtgtggattgtctgccaaaaggctcagctgctgctcctacacacactttcagttctgattctgccgtactctgctctctgtgtgtgataggggagggaagaggggggggggggggtccctaccctactttatccctccatttgttctattcatctcctgttctagtgtcctagaatcaaactgtacccagacttggagagatctccctctacctgctcaaaagcttgctgcatctttttccttgcaaatgcttaaagaaaggagtggaaaattgcactttgctaggattgtactacagtagtgctggctcataacctgtctgggaattgacttgtgcaaagatttttggggtgtcttttggtggtcctgaaaaggattaggaatgtgcagtgaccagtgagagggttggtcaatctctgcaaaagcaaaacagacctacatctacatagctccagacattaggatttatgaacacttcacagttactatctccttttcttacatatatatactagtagtaataatagtagaatgcgtgcaatcaaatctcaaaactttgaatgattaactaatgcaaaaccatgagggtttgacatgagaaaatgatattggtagagttgtcatgaaaaacacttccatatagttttatttttaatagcttgtgtaaattagaaaaagtagcgatgaaacatgtgcattgaggctacgttgtccaaaacgagaagtaaaaaaaagagagagagagagaagggggtagtaattgatcattaattaatatttcatggcttgtcaacccttggaagttaaccacttaaccttaatcatccagaaaatggagaaaatggagagaggttattaggatagcatcttgtgttggacactgtttgcaactgttttgagtccatttctgctaatgccatttatgatcagacatgtgcaagacaagagtgtgcaactagtgttaatagctcaagaacccaaggagcagaagcaagctgaagagtgaagaggaggacagccaagaaagcagcagaggcaagcaagcaagcaggtggtgtgcctgccatggcggccgccgcgctgctagctagctgatggttagttgccgccgccgccgctgcagaggtcgaggagcttcttcctcccctcggcgacctcgtcgaataggtcgtcgatcagggcgatgacgtcctcgcacccggacctcagcgcgtcggcgcgcagggcgacctccgccgccgccgccgcgacgtcgccggccctgtccacggcgtccctggcctgctccaccgccgccctggcgcgccggaactcgtgcatcatcgcgcctccccctgcgtcgacgacggagggcgacaccgccgccgccgccgccgcggcgcgctgctgcgcgcgggcgagcgccgacgcgaacgcggcgccgaagtaggcgccgcagtcggtggctccgccggcgccgccggcgtcgggccagtagtggagcacgccccaggagaggagcgtgaggaggaaggaggtgagcatcctggtcgcgcagagcacgccgcggaagccgttgaacccggtgaacttggcgtcgggcgggatggtctcggcgaggcggagcgccagcgcctcggcgcgcgtctccacgagcaccctgttctcctccctgatcgccatggcgtccctcctgcacgccgacatcgccctcgttacctgcacccacagatcgatcgtcacgacgacggcggcggaggcggcggcggcggcgtgtgagtgactgacctcgaaggagaggtgggaggagcggagggcggaggcgaggcgggaggcggagtcggagtagccctcgagggaggcggcgccgaggcggagggcgcggcaggcgtcgcagaggcgggaggtctcgtccatgtactcgtcgagccaggcggcgccgccggggaggtggagcgagccgacgagccgggcgagccccgcgtgcgccgcgcggatcagcgccagcgccgcccgcagcgacgccgccgacacgaactccgccgccgccgacgacgccgccagcgaccgctccagctcgtccagccccctcgccagcgtcccgtagaacgccgccaccgtcgacggcgacggcttcatggccagagatgatatctccgagatctcgagagaggttagctagctatagctatagctacagcttatggtggtagctagctagcaatatggagggagagcaataatggcgcgagcgaacgaacgaacgagtgcaactgtgcaaccgtgcgggatggatatatggagttggggttggatggcgaccttgttcttactcccaagcccaacaaggctctactagctagtagtaggtatagctaggctagccttctttgcaactctactgcaagcaacaatggcctctctctctctctctagagatctctctcatgtggccatggctgctggtagctggtgaggaagagacttggatggatggatggatgtatggaaggaagaagatgggagggaaagggggctcctttgtgctgtgtgttatatagggccagggcacttctccaggggggctacatgcctttaggctttagctatgtactgctctttctgccacacctactgccagtcaaagcctagagaattttcattgatttggggtgaatttttcagggactggcaaaaataactgtggatatatatggtaaccagaaatttgttcaaataaactttaaacaataaggaccattttggttttgattccaaaatatatatatgtcctaccaaattgttggtactttgaatagaattttagctagtgttcggtttgctatcaaaatatgcccaataacacatataagttgctaaaaaaatggcactactaaaatttatctatattttggcattgtcaacattttaacatgacagtaaaccaaacaagccttaatttcttttatcttctgttgtcaaagatgtcacgatgtatggaaaaaaacatgaaattttgagagattttgagggaaagctagcatatttactctttttcttgatttgatccactagtaactagtaccaaattaaaatacctgaaactcaagagagatcgatttgaaattccaaatcgtgctaccaccgagcagacaacatgtcaattacacccaaagttgatagtgcgagctatcatcaataataacaatcatcatcatcatcatctcatgagaggtagggtggaccgtggacttaattccctacgagatcgagtgattgatcgaccggatatatatgttcatgggtcacctttttatttcccttccttataattagctcgctcgcttttctgaaagatacttgtcagtagactgtgtttttttttttgacacagtgatgatgtggagttgtggatgccctagctagagagagacagttgatggagatctactgcatttggcactagtgttcactggccggtcagctgatccatgcaagcaagctatccctttttcttcttttcttttttttttctttttgaaaagattgtatgcaagatacttcgtccgtttcatattataagactttctagtattgttcacattcatacatatgttaatgaatctacacatttacgtgtatctagattcattaacatctatatgaatatgagcagtgttagaaagttttataacctgaaacggaggtagtacttgttaagagtatttattctgatatggatataccgaagggtgagaaaggagacaacttatatgtatgcacaaatcatttgtatgcatgttctcatgtcattctactcaatctcctttttttttgtttttttttaccatcgtgtgtcattctactcttgactgaaattagttatcatcaaacaaaaactctaaactatgagcacacttttttttttgacatgatgagcacaatgttttaggggtattggatccaagtagagaaatcaatagacaaattaggaaggtagggaattccctttgttttgtgggttttacccatcacaaatacattggcaccgtgtttagttacaaagtttttcttcaaaatttcaacttttccataacatcaaaactttcctgcacacacaaactttcaacttttccatcacatcattctaatttcaaccaaacttccaattttggtaggaactaaacacagcctagctctacttattcttgtgattgtgcatattaatgctctacaccaatatccaaaaaagatatagttcccaatttttcttttggcaattgggcttttgtaaggttgtggtctatgtggccatgacaaccccaccctagaaagcgaggatgcaaccaactaaaggatggcgatgagagtcggaggatgagtggtgtggtatggatatcggatggaatcactagagagaagtgaaaaggatggaggggaaacgagctagcgattgatgaggaaaaccgacgagcaccataagggttgaaggtgtcaaattagagtggagaatacaagaaatatatatactttggaagttagttttgtttttattggtgggcttgggcaatggtggagcataattgtcgactatacacaatcacgatttatgccttcttgctctctctatcataatatccaatacagaggtagtcatgattcaatacattttcatggccaataacatttaaccaaaatactccatgtgcaaaccttgttcccatagtaacctttttatcccctaggattcaccgttaatgtttgcagtagctaccttttttttagttctctatagagatatactttggtcctcaaatttgtgttctaatgcacttattagggtctgatttgtgatgcgatcagatcctccacttgtgtaggggtgactagctaactgcagaagatccgatgtgagcaaagattacaggtgagactaatccgaatctgaaaatttgactgatgacttgacccgaatctttcctccaaaacggtcatcacagtggggtttgggccccctcattgccatgaaagtaagaaaaaaaaatcaccaaggctacttaattgctactagtattagtttcaaaaacttaataattactattagctactaattagtactataaactagtacctttctctacaaaagtaaatccttccattcctgaatattagtagagtaaggtgatcgtatttagttggatataatgttctttatttagacgtcgccgaactagtactatacattcgattcctctcctttttcatttcgaataaaatgtcttttttccccttgtgatggggcatggacatctgcataaagttgttattatatctttattatgctgtgctaattattacctcatatgtgacaatgcaagatatggcaagaagaaatattatttttttttcttctccttttatcatgagctttccatcttgggtggacacttggtgccactaggagtaggaagctgtaattgagagatctccttgcccttgtgaatatatgtggtactagtattgctacattgaagctaggtgagcttgcttttgttttgggggaaactggaccaagatttcttaatcttgtgaagtgatggtgatggtggtagtagtggtggtaggctagaaaggccattgattgactcatgtgcttacaggaccccatttcataagcaatatatgcaaatgattacaatgtatctatgccctcctactattttatatagcacggttttgtttcaccgtgaaatatcgaatcaaatcaaactttgaccattaatttctcttacaataacattttatttacccaatatcgtataattgtacaacttttgtaccactaaaacatagtatatttttaagatcacaataatgttctctgccacttggcatacaataaaaagtgttctaataataaaagtctactaaacatatgctatctctgtattttcaatatatatgacactattatctttatttgatcaaattaaactttcaaaactttgaccatcgatagctctcctcaaaatatttagtttgaaaacatataaatcatatagattggtttttctttataagttctttgtgatattataattccgttagatattatccttatattctaatagtaaaataatgcacatcagagaccgaataaagtcaatagtgctacacatttaaatgtgacggcagtatgtcgggctaatatgtgatcgaagtcaagtgagtactgtacacggtgccaggggcggaggcaaagtatattagcggtcaagacaactttttattaagcaaactcaatataaacttaggcacccgcccgcatcagcttaaactcaatctaaagtagagtaaattaagcaaatgacacccctccccgtttcgttctagctccacccctgcacggtgcgcagctccattccactcacttgcatccatggcttcacttcacaatccattcttgcccatgcattgcatatgccaccatcatcgatggcaataatatgctgaacccgtcgtgccatcgacggtgggtttcctagctcccagcctccctcctgttaccgagaagagggctaatcatctcctccttgttccaaggctctctgcattggaatgaatgattcaccatgtgactgaccttgctgctgccctcttcctttcctcgagccatctgtagatatcagagaaattcatcatgctgcagatgacctcgaatcgaatccatcgagtagcttagcttgtagctagggttcctttggttaatttgctccaatggcattgctttggttgctcagaaaagaaaagaaaaactctaatttcatggggtttggttaattcctaggggagggggggggggaatggggatgatgatgcatcatcctgcatatatgtttgcatcaaatccatatctcgaacccccactatatgtctatgttggtaatgcagagatcttcttttcagattctctcacttggcccaagctttaattctcccttttgttttttcctcggctgcatcttgctggaattaatcctcctcctttttatatatatagcgccttttgctttgggattcgatttttcttttaatttcagagtgtaattaaaagaattgtaaaaagtttccactgaaaacattatgtaacaaaattcgtgaaactatattaccataatttctagggttacgcgctgcatgccaaactacttgtggttttgtgcaacatagagcataatacccaggattttatgatattcactccaaaaaagattgtaaaaattcgccactgaaaacatgaggtaagctttttttttctttttctttgtaggaaatagagcatgttgttagtgagaaattcagaggaattgatttatttgcttttgtacttactactacttattttatgatgtttttttgtttgtgctgcactagttcagtgaaaatttgtagccatgctaattgcagaatttatatatatttatgggttggtgttcgtgggttgttggagaatgtgatgctcttggactcggaggaaggtatgttggtcctgcttctccatgcagatctcgttggctaattaaaaagccttgccttcagctcactttcagaacacttttcagctggctcaagactcgattatcttctgtctatgttcttccaagtggaaattaaagaaagaaaatatcttttgtatcagaggttttctatggtcgttgaagttgcatatgtatttttagcgttaattaggaggtatatgtacctatcaatacctctcgaaagaccattaaaaaaaaacctgtaccagcaaggaaaactttaacactgagagtattttatttctgtgctctagttctaggtttgctttttctctgctcttctcatgactcttgatttgatttcaagttacgccatgtgaccacttctcattttatatgccatcttaatcaaagtatcctattgtaaggtgttggcttgtcttaactatagaaaaataagggggttaaagtccccattcttagtttctcaccaatatgattatgaatcttgatctcttaatctataccttaaacctcaagtcatgccccccggaccacttccctctattaagttccaaatcctatggataatagataatcagttatctcaatgctgtaataatagcaaattagccatatggttgacggcaatgaaaaggtttataggatagggttgtcaactattcttcttttttccttttcttcattcagtgttcatttccaattgcatcaattatttgtcaacatttaagagcagacaatatagcatgccttgcttggattgtttgtctggaaaggctcaaacaagacctacatattctgagctttaacaaaatggggcccaaacaattctatgtggagttcctgatgcatataggtcatattcccttttacttggcaaaaaaacatattttctttacgacttctgaagccactgccttggccattttggttttcagttttcagccgaaattggtagctggtcatcttcatcaaacctcatctcatcttcttgtcgaggaaaaaacagtgatagataaatataatgttgatgatacatttatggctcttattttctagctaattgtagatgaaaagggggaattccaaattttacaggattttcattggcatcaattctgatggaggccttagccttttattagcttccacataaacacagatggtaatttacacctttttgcagatcctgaaaattggtttctttggaaaaaagaacattggtaacattgtgcacactgcaaaatatggtataatcacttatgcggaaaaatatgtatgacattagagtatgtatccaatttcttccatgagaatatgatatctaagatgaaccttgctcagcaatactgagcaggattctagtcgtactgccgaagcatctctccctgttgtgtcctacttttttcttgcatcagattactcaagaaagatgaggcgagtggcgatacgcgtgtgagtgattcccattgcaaatcttcatagatgaactcgcatgaataatatatccccctgatcggcacagttcatcgtggccccgcttgtcggtgactgttcacgggcattttcgtttcgcagagagaatttttctagcttctaatccacagagttgaagaggactaccatgatggttatggttttacatgtgcaaaatctaggacaggataggccaacaaaatgcttttaggaattaattcttactgaatacttcctaatcatacacaattccttttttatgcatatgtagcagccaacccaaatgatgtgttatatgtgatctcaagagtgttccttttttctttcctttctttcttttttcttcaattggccacctgaagaaaagattggctccacacatttgaactgtgcccttttctgatgcttttgcatgataggtcactctcattgttcacaccaaagctcaactaaattattagtttaatggagatcaactaaattaaactagcttttctctttgcttttgatcttgctttggacacgagccaggagatcttaccgaaatctagagcggccgaatccaccaccatcaccactgattagtttggaatctgcaagcttaagctagcattgtacaataattctccaaagccctaatcatggcgtccacacccagcatgaacccctctacccttctacccttaagaggggcccctgaaaacagcgtgaagacgggttttcagtgacggtgaccggtacggtctccggaccaccatggtcgtcatcgtcttcgcaccctttttattttttcggttgggtgataaggtgatgatcaggggggagattggagaagattgtgctacaaaagtggcagcttcactttgtgtcgctggaggaggcatggcaccctggggtctaatcagccatcattccatcctcaatttttcttaagttgggagcattttgcatcactcttttgagcttttgggtggaaaaaggaggagaaaggagaggggaggaggaaattcacctttgtttatgtcaaccctcctgttgcgtaatcgcgccttcctgcactgttttaaggatggatgaatagatcagttgtttctaagaaaagatagaagaaaaccgagcgaaagaaaaggcgaaaaagggagtctctttgagcaaatggtttggtcatggattttcaaaagatggatgtatggtttatttcttgccaggtgagtgtagatactcactcctccccaaggggaatcacccaatgattgacagaatgatcattgataggcaaagcagaaagaatgaggggcacaatcccatcggattggcatcatataaagcaatcttgatcttttttatgaatgccattatgagcccatgattagatctcaacttaacaaagaaaactttgtagaacaaatggtacactcatattccaaaggacaagtggttctctttattcttgtacaggtgtatgtatgtacaaactagaattacatgatcagcagctttacaacgtgcaatgtacattagggtctttttgttgcagaagcttgatgcacacacagttgcaagggggcagtttccatcagatgccagcacccattatctcccaaaaattcctgctatttctctgcaatactgaaacatccgaatgctagattcaaatgctacagtccacatacttcttgcaaagaagggctgaagatcttgacttaagatgtcccttctgatttattgttcctgtcaaccagtaataaacagccaggttaagagcttgttcactttgttattaccattttcgaccttaccaacatttggtagtaccaaattttggcatattttaatgttactaaattttggtagtgtccgaagcgtttagtttaaagatttaccaaatatgggtagtgtttttaagagtggaagcttccaaattttccaaaatgtggtatggtagcaatggcaagaatttgtttggtatgttgccctaccaaaatttggtagggttgaaaatggtaataaagtgaacaaaccttaaatttgataactggtgttactatgtctatgtgatatgcagaaaagttctgatgcactagtaattattctcgttgcatgagaaacttgagctgaattccatgtataatatacagatatcgcacaataagatgtaaacttatttgggtacatatgaaaatcgagtgtcatacacagaacaaactaagggtttctaaaagcacccagaaaaactccattttagctatcttgtccgaattaatttaaataaacaaaacttttgaatataccagaaagaacacagtaataatgtcattttaatcaggacataggatctaactttcaaatgataacaaagtttcaaaatgatactggtttcccaatccttaacctgtctagaatggtgcctaaggaagtccataacacctgcttagagaacacatgtatttgcactttcaggtgctaaaaactttgatttttttcaaaggattgtaacactcattagaatgacaagaaaaataacgaggactcagagacgcttgcataactctaatttctgcaaataaaatagtggaaacatgacacaacacatttatattagacagtccaactttctggtgattcattgcattgggggtagacagacttcaccatccacattgggctcagcacggaatgttagatgcaggaattccggaatcacagtgccattgaatgcgatacatgaggacacaaataaccaggaaacattgtattctgctcccctgctcccccctagtgattcccaaggtgtaaagcaaatttattttggatgcacaaatataacatagtgcttcctattcacttgtgaagtttgggtaataaacaaaagtacatagaaattttgtgcttctgtattagcaacacaagtttagacttcaggccaccctaaggagcactgcttgagcagagcattctgctaacttacacacacaattgacggaagtggaaagcagatagcttaagcttaattagtcccatcacgattcaactacaaccaaagcatagatattatcccattcctcataaagaacaatgggtaaatcaaggtcaccatgccaactcgctgcagggataacagaggagcctgcagtctgggtaaatcaaggtcaccatgccaactcgctgcagcgataacagaggagtctgcagtctggaagctttgcaggagcacaaatggagctttaagttcgaaacaatgtcttggtcatgaaattttgtactgagtaaaagtctttattgtttcttttcttcaatttaatatttttggctttgatatacatctgcgtactttgagcctcgttcattgcccttaattcaaatgcgcattctctaaaaacaaaataaataaaatagaaccacgaacatcaacaatcaacatacaactaaccaaatcagacaatctgctggccgttcagtagcttaatatctacaattaagtgcacaagcacacgtaagaattaattcttaaccggatgaaataatcaggtaattctggacatccagatggaggaggaggagatttgtggcaatggaggtttcacctctcgcccagggaccggtagaacctggcgaagcggccgcgctccttgggcttgggcttgacgggcttcttccggcggagcccggcgatctcctgcaccagcgggacgtgcaccagcaccgtcctccacgccacgtaccagcctgcgacccgccgccgccgcgagcagcgaacgaaagaatcagggaaacccctcgagccaaaagccgaagcgagaggaggagagggcggccgtactgagggcgatgatggagaggacgaaggcgaaggcgaggaggggccggaggacgaagacgacggcgatctcccacgccgccgccgccagcgcggctcctcctcctcctcctccggccatggcgccgcggcgacgcttcgtcggcagaagggggaaggtaaggagacgtggggaatcggcgggttagtccatgacatgtggggcccacgaaagcttagaggagcaaagctaaatcgttgcgtagaagtttgtgttactagcttgtgccttgtggcaggggtagacggatctggaattcgagaggtgtttcataacttgccctttaatgcaaacggatttgttatgtttcaccaaatgaaattcgatgtttcatcagtgtgaatgaaatgtctcagtcgtgatttgaatgtgttttaatattttaacaaggtgaaatatttttttaacagtaaaacattttatctggtagagcgcccgatttgtaagttccctgcctgaatttggcccaggtgtgcgcacaattggccgagtgcatgtaaatttggcccacttgcgcgttttataatttcatcccatctatggtcaaattcggcctgaatgtttacgatcagttttaagggtacagagacgattgccaatcaacacatactagcaattaatcttcagagtccccagggtaacataacatcttctaccctataattcaccaactacactcatgcaaacctcattcatcaaatccgacggtccagaatcgtcgaattcaacggctcgactccgcacccatgcctgcccgcgttcctcctctcccgtttcacccgcccatcgcgccgccgccggtttccaccacgcccccccccccccccccccgaccatccctccccctccccaatcccgcaccgccggcttccactgctctcctggccatctctcccacgccaccatcgtcgccgtatccccgtcgccgccgctacaccatcgccgagaatccccttcgccgccgtctgcgggccgcgagctcctcccctccccctcagccgccgccgatgcgacggcctctggcttccaacacgcttcgaagcctctgcttccgtcaccacgcggcctgcccgtccgccggcatgaatcaaccgcgatctcagccctagaagggcgtgcaatgaagcagccgctgctgcttggcgcacatatcggcccgtacgcttgcactacaccggtgcccgcactaggtaagatcctctttgagatttccttatggtacgaatcctgctgaggagtttagaaccattttaagcctcttaatcattttatctgctcaaatcctctcttttgtttggaagatcaatgtggtttatttttgctatgttggaacaattaagcgaatgaaatctacttgttggtactatggcattaacctgctgtttgtaccgtttttatttctggttgaatcttgtgattttgctgaaatcttatcacctaacgtgaatgtatgctttcagtccattcagttgaaaatctatttaatatcattttctttttagtcttggtagcacggttgacaataattatcggtcagtccttggttttgtggtgatgagtcgtgagtcaaatagcatctataaaaggattctacctaataattttcagagtgatgccctgctctaatatttacccccatttttttttatctcaggtttgacctctgtatttcagtgccgtctataattcattaagctacttttgcttacccttgtctgtctcttttcattgctgaaagttgatgtcttttttaaggctaagaaagagctcattctatcttctgtaaattttacaggctcactgaatgatgccaagatatatgacaaggtatggtctctaagtggcttcctgaatttacaactgaaccctgtccacatctctccattaactgagtcagtctaatgggatagaagcactacaatactgtattggtgatggacgtcctgcaggccctggtaaacaaggcaatctcagctggcgccatgtgcgggatgggaggcaggctgcggccaccagcgatttctttgtatgcaaaacttcttcggcatggcgttacggcttaaatggttggcaaagagaggagagcatcgcgacagaccttggacaaccattgagactaagcagccgaaggagttacaggacctgttcttctcagccacacggcaagtgttgggagatgggggaaaacacaaagttttggcttgcggattggctgccaattgggagcataaaggcgagatttccgttaatcttcagtcatgtggagcgcaagggtttgacagtggcgagaggactacagaaccataggtgggtgcgcgacatcaaaggagctccatccaaccgagccattggggagtactttcaaatttgggatgcgatccagaaggtgcagctgcgaggaggggaagaggatgagacaatatggaagtgggcctcgaatggaagatttaccccttcctctgcctatgacatgttttttatggcaaacacagaggcgcgttgtggcaatctagtttggcacacgagaacaccgacaaaggttaagttctttatgtggttggcagaaaaaggccgttgcctaacggccgacaacctgagcaagcgcggatggccacaccatcaaacattctcactatgcaccagcagcgacgaggactgtgagcatctctttgtttcctgcccatacaccaccagagtatggaggatgatcaagggttgggctggaattggcatccaactgccggctgaagcagggttggaactaggggaatggtggctcttggcgtggcaaggagttcagactagctgcaggggcgcttttgacacgctagttttgcttgtctgttggatggtttggaaggagagaaacgcacgtgttttccagagtcagagccggacagcgggtagcctctttgctttgattaaagaggaggttgtggtctggaaagaagccggggttttcaaagttttaggagagtaacaacagcatgatgtaattgttttttctttcgggaagttgcccttgtgacaacatccttttacttcgacagcctcttgtcgaagttggaaccttgtaaatatgtacatacccctttcttaagtaaatttggtccgcctatcttaggccggcccggctaaaaaaataatgtgtggagagtggagactatgaatcttaaaagttttgattttttattttttctatggagggcatactaccatttgtgtaatgtgtaatgtgtaaagaactactgataatgcattaggggatttggctaggatttggagaagctggttcttgcgagtatttggtttttcctttgaatctggtgaaatgtgataagagatttggctttctatttgaatctattgatatgttatggagattttgctaggatttacactgatcttctccttttgaaatgcctctgctcaaatcctccccccgctgactaaaaccatgcaatcttggacatgcgcttcctcgtcgatattaggtagtgcatatcaatcgttgctatattttaataataggctgtaatttcactatgaattaaaatatacgtacttgcctaaatattatttatgatatttcgttacttcttttcttagaaggcttaattattttttgtgcatcaaagacatgaatattctatgcgggagttcataaactctcaaaatatgctctcagattatgtcatacttattgaccttcactgatgaaatgggtacatcttatctgatttgggaacacagacacactatttgattgtcatttgtatatagctgatagtatgccccgcatatactaattaacttttttgtggatgggtgcataaccgcagtctacaggtcatcagccgatgtatcaacaaggggagtctgccctaatgtcttaacgggcacctcaagctgcattcaatggcctctgaaaaccttaaaccttcaaggacaggaaggtaactgaccttccaaaataagaggatgctccatgttgttacgctgtgatgatgggaatattgcacaagggctttgagtaattcatggtttgtttctgactgatgtgatgagattaagctatatgtattgtcctttctgatggctatcaacaactcaactacttttgccattgtgagctctagcatcaatcattcatctttgttcttgttgtttttgatgcacactgcctaaggccttgattagctgtatttgttatacttagattatatgtcagataatgggaacctcttcattccctgtcttgccaatgaggatcgtggattattttactataaaagtattccctgatttctcgatgtactgtaaaatagtatcacttgtgtactattttgtgaggaaacatttatctatttgttacgctggtattacttgacccctactgaaaacaagcaatctgctttagcattcactttcgaattgtatatatatgcaaatgtatgtataactctctgtacaagtttgaggtcttcagacataaaccatagcgtgtatttgtgtcatataaggctgtgttagggaactaatccctccaacctgcaaaacagaatgattcgttagcgcttgattaattaagtattagcctttttcgaaaatggattaatatgactttttttaaacaactttcgtatagtaaatttttgaaaaaactaatcgtttaatagcttgggaagcgtgcgcacgaaaaacgagagaagtgagttgagaaagaagggggaagaacacggcctaagaccctgttcagatgggactaaaacttttaagtccctatcacatcagatgtttggatattaattataaatattaaacatagattattaataaaacccatccataattttggactaattcacgagacgaatctattaagtctaattaatccatgattagcctatgtgatgctacagtaaacattctctaattatgggttaattaggcttaaaaaatttatctcacaaattagctttcatttatgtaattagttttgtaaataatctatatttttaatactctaaattagtgtctaaatacagggactaaagttaagtccctggatccaaacaccacctaagtaatataaggtttcatggtcgtttggaacttaaattaaacactaaacactatagagaacttggataaattgatcactcagtataaacactatagagaatttggataaattaaacactccaaatcaaaatgagaaaaaaaacacgtacttaccttcctcgccacatattaaagttttctaaagtttgttgattttacattattctatgcttagttgtcaaaacatgtattatcttttgacatcaatatagtcgtagcgttagcacgtgcatattactagttaaaataactttaaaaacaagagagaaatggtgctggtagaaaagcacgtgcatattactagttaaaataactttaaaaacaagagagaaatggtgctggtagaaaagggatgaactcataggggattcctgctatttcccttagatataagcagatggttaattcaaataaacagcgcacaaattaatagcgtagggatgagttctaacaatggtaagatatcctgcaatgttcaggagactcatttaccataataatcttccaatgcaaaacaacctagagaccagaaagtctgtcggcaagaattaaatttgggcacttctcaaaaccatggtaggtagctggtacaggatagaatacgaaatcacagcctgcaaaccacaaaaaaatgaaacagatatgagcgctaaagaacaacttgaactttttcttttttatcagcttctcaacaaaataccagttttctgaatgtgctcctctatcgtggatgtgcccacagcagtccgtacctactcggcatttgaacgcctcgttgtaaggtactaaccaccaaagcatcataaaggtatggaacaccaagctacatgatgttaaaaagaagttaagaaaaaagaactgttgtgttgtagatgctaggaagaaaatgattattataaaagaatccagtgaaattgaaaaattattcagatcctatcactgcttttcaaaatccttcatttgaattaacattgctctcaactcttgagtagtgttacctaaattgtttcagaaacttattttcatttgcatcaataaccaatctttggtttataatcgctttgtaaacaggccatgcaagccgttttatataaatgaagacagtaagcgcaatgcaaaatactactccctccttcccaaattgatcattaagcccttgagactcttaacatcaacagatgtgcccttgagactcttaacatcaagcccacaaaagaggcaacttctataagttcataaaaaaaaatgaaaacaattccaatccacaccacacagggccagtgtgatttattctcatgccaacagccttagctacacgacagcaccattatagggatacaacatctaccaagcatgtctcgtgcaacataacaatatctatttattggcaattatacagatgagatcactaatttgttgccaacaactttaaactttgctatgtcaaaatcagtgggcattcatgcatataacaagacaaaattaaaattgaagattttgaacaatatctttgacaagcaggccaagtcaacaaagtctcaggaaaaaagctatcaatgtttcaaaaaagtcagaataaatgactcgacattcctatgtcactaggccataacccagaagttgctaaggctataacccagaagttgctaacaagcatttttaatgtaatcaatattcaatataccttgaattggatcctactaccacgagagttgccattgtgttctaagaacaattctgaaatgtggaaacatttatcagaactttgtgccactgagattatagaaatcccaggaccatatatgttaatgatccatcgtcaaatcaaatattttactcgatgtaacgtagagcagaatgtagtgcaaactggttaaataatttgatatccccgcaataaataacacaactttagttagtgaatgtcaaacatgttatggttactgaaacaaaaccgcgtgtaaagtcaaccttggcattgtctctacatgtgatatttcttgtcatgttttgacattgtttccactacgcttccttttagtaggtttcgtggaagtgtttgtagtttcagcaaccatgagtttttgagcagacagctggccaataaagagaacattctgtgcccaaccagcatagttcccaaatttagcaacaaatgcatcggcaacagcaacactaagttttggggttaagctcttgccagctagctccggcatcagatattgtgtagcaacctgcattaaatccatataggaagggcttaaaaacaaaatacaattgtttgtaggtcatataaaactcatgtgaaaaaacctccttcacaagacttcccatcaactttaattgtttttatgtctagagagtgaagtcaattgtgaatacattgaatactatttcccattcaaatgatgaaagtcccaccctcacccaactaaaaaaaatgaaaaagggcaaaccttgttatgcagagcttatggttcaacaaaaattggaagtaaatatgatcagggtagaatgtgcaaaacaggttcccattcaaatagtaagaatgtgtaaaatgatagtgagggaactgacatggatgtgaattaattaattttatcaacaatttttcatggaaaagtctatgcatactaaaattttcttacaaaattcttacaaactctaatgtggtaagccgtgagtaaatctagatttgttgcaacttccatctagttaaatcaaacggttgagacatttgttagtataagagttttgtaagaaaattttattatgtgtagcagtactcattttcataccttccagacatgtgtgtcaacaggaatagcatggttctgatcgagtgagaacaaagcaacacaggctgcaacttttggcccaacacctggaagggtgcaaagagcctcaatcacctccgggagttcccttgtacgcaatgaggcaagccatttctcgcctccaccaggcttggcctgtaatattttagcagtgccgacgatgtactttgccctgttcatttattagaacacagcatttgctcaaatcagtgtgctattgactagtatctcaaatcaaatgtagtatacataatatgatagaactgagttatgattcaagcaatccaaacaagtgttacgcctgattcaaaatgttatttccccaaagctgaaacctcaccacacaaatgtgaagttgagattctctacatattcatcgtataaacagtaatggtaggatcatcgttttatcgtctacgagctctgctattatcagcacattgatatagcacgcgaatttagtcacccattatgtctgaattataattaacacaagatctagatcctaccaatgccaaatgggttaattggaaaatacaaagtaagcatcaaaatgaacctatagatgcttcaaccaatactactccaacataagtaacaatgactatagatgaaaatcctttgtgaactgacctgtacccgaacccggcatcccggagctcttgctccgacacgcgcgcgagccgctcgatcgtggggaattggtggaattggtatcctccaacctcgccgagccgctccccgtagccggccagcgcccacaccatcttctcgatccgcgcgatgttgttgttggaggagcagaggaactggaacacgcactcgacggggtcctgcctgagcacccgggcgccgccgcccccgagccgcgcggagacctccgcgaaccgcgcgtccgcggcggcgaaccggcgccagaggtcggcgagcggcacggcggcgttgaggtagtcggagagcgcggcgcgggccgccgcggggacggaggaggaggaggagccgccgttgttgtggaggaggaaggcgaggcggccgtcggaggacgggaggtgggagagggagacgaggtgaggccccacggcgccggtgaagcggagcggggagagagacgtgcggcgccacaggaaggtctgccccgtggggagggtgagcgggagggacaggtcggcggcggagagcggcagggggtgccactctccgtcctcctcctcgacggcggcggcggagacgagggggaggcggcggcgggcgggaggagggcggcggtcggcggcctcggatttgggggtgcccacgggcggggttggcggtggtgttgcggtggtggaagagaggaggggaggggagggtgggagcggcggccggactcggcggcggcggcgaggtggcatcccggcggcggcggcggcggcaacggtcggaaggggaggatgacaccccatgaacagctcaaagacgagcactccaaagctgtaaacatcgcacttctccgtcacccttgttgtatatgctagctctgccacatcaatattaagaccttgtttcaataaatttgtatagaaggaattctattctattttgtacaatctaagatgcatctttgcgaggttgactataataactattatcagaaaatactaatgagatgaatgcctaagctgttagctcaaatacttgtcaaaatgttaacaaaaaatacaagaggataaagtaactgatacattataaaattttacctggagcaagataaccttttgtcccagcaagctttgtgcagttcgatgcctctacatctagaattttggcgataccaaaatcagatatgcaagctctgaattccagatcaagcaaaatgttgttgcttgttatatctcgatggactatgggtgcaaagcaatcatgatgtatgtaagacaaagcattatcaacatcctttacaatatttatccttcgcatccaatccaactcaattgcagtgttatggttctccaaatatcttgacaagcttcctctatccatgtattcatagacaagaaatttgacgtgaactgcagaacagtacccaaagagtttcacaatatttcgatgccgaatactcatcaaagcatctacttcccgcttaaatattagctcgtcatcttccgtcatatgaattttctttactgcaaatatctcgcctgttggcaattgagctctgtagacagatccgtttcctcccataccaatgcaatgagttccattgaaattctctgtggcttcaaaactctgcttgcacacatctcctccatcaaagttccagactgaaaacacttttgtgtttccagctccattttcactttgctccacagatttcatctttctgcgttgccatgtcacaagtgctgtgatgaacagaacagatatgccagcagcagcagcaacaccaagtaaaatgggtctgaatttctttcctttgccacctttctgaataaggttgcaaggtggtaaagctttgactgtaccacacaagtgtttattatgcacgaaccactcaactggagcttcttccaagaacttaatgtgtggcactggcccttccaaattattgtaagacacatccatggatgagaggctgatcatacccttaaatgatggtggtatgctgccatttaatgtgttgtgtgaaagattgagggcttcaagcatgttcaaaccactcagctgacttggtatgatcccggcaaatgaattgtcacttaaatccaacaattcttgaaggtatgtcagcatccctagtttaataggtatgcttcctccgaggtgattatgtcccagccttagtgattgaagtttcaaacagttctcaattgatccctgtattggtccgcttaggttgttcaatgataaatccaaatactcgagattctgtagagaacctagttcctctggtatgtttccatggagcaagttgttcgcgaggctcaaattgaatagagacaccatactaccaatttctggtggaatgtgcccttcaattttatttgatgaaatatcaaaactccctaaccaagacaatttccccaagcttgacggtaggactccggttatgcgattgtttgatacatgtagatgttaaagggtatatgtgtcttttcatctcttgtatacattatatgtggtccttgaccctaagtcaatagtacatagtaaattccccaaatttatctatcactgtaagatggtatcagagctcatgggctgaaccctagccctcgatccccgttgtccgccggcgctccggcttgccggcggcggctccctatcgggcaaatcttcttcacgtcctcctcgtccggatcagcagcgggattcacagcaagtcagtgtgattcgtccgtcaagcgtgagtgcatcgctcattgcagccgctcgtcacgcggttgctccgctcagccgttgttgctgctcttccactactgctgccgctgtgtgctgctggtgctaattcaggagacaatacatcaagtcctgtaagcaagtctctgtccagtcaatttgtcaaattttcttctgctggtcttgatggcaacatccgacccctttcttggaggtggagctctgctctccacggacattaagctaaatggtcaaaattatcaagaatgagaactttcagctcgtatgcttttgaggtcgattggtcaagcatctcacctcacagatgatcctcctgatgagaaaacggatgcaactaaaattaaggcgtggaaaacagcagatgatcgtgttatgggattcatattcatgagtgtagaggtgcctattcggatgagtttcagggatcacactaccgctaaagagatgtgggactacctcaaacagaggtacactcaagaaagcggagctttgcgtttttccttgctgcagaatttgcacaacttacaacaacaagatcagtccattgaagaattttataatgcctttactcggttgtctggacagcttgaggcacagactccaaaaggtgcttcaggttgtgcacaatgcaaggcgagagagaagcatgatcaagaaaatctagtgtatcaatttgtcatgagactttcctctcaatttgagtccattcgagttcagttgcttggacgtcctacacgtcctactatggcggaggctcttgcagatctaatcgctgaggagacacgtctttgttccttggacactactcctactcctgtggttactcacaatgtcatggcagcacctcagcgtgttggagctcctatgggcgggatccctgaattcagttccatcgccaaaagtgatcgtatttgctctcattgcaagaaggttggacatatttccgatgattgcttctatcttcatccagagaagttggctgattatcaagctaggcgtgcagcggtcccccgtcctcgtgcgacggctagtgctcctgttttcttggatatcactgctgctggtccttctagtactagtgctggtggcagtgcctctagcgccgtctcatgtgctcctcagtcattggttgcaagaccgtcttatcaagccagtgattggtcatggccatcaccatagttggtccccaaggcctctaagtgtgaggtcatcttcgcctaccacttttgttgccatctcctacttgttgcttttgcttgctgtttggagaaaaaggttgttgctgctatagtatatatctgtccttcagttcagttcaagtcttctgttatccattaaatctatctaagtcaatttcatatcttcaattcgtctaagtgtatgagtcttttatatcatcaccaacaacaacaacagctcccaccggagctggattgtctcaacctactccaaatctttgaagagccgaagaacaatttgtgaaggcttcatggtaccaagggctgaagaacaatttgtgaaagcctcgaggtccacttcattgaggaggggatgcatctttcctacttaatcatcaagacttacatgcttcgacaatatctttaagcttatattttggttttagtttagttgtaccttccaaatgcattgttgtatacacattgcatttgagtgggggtgttaaagggtatatgtgtcttttcatctctacaggagctggttcttatttgctttgacatactcccatcaagcttgccctctctgtcatccttgaagaggttcactctgatgtttagcaacaatattgactcgatatgttaaagggtatatgtgtcttttcatctcttgtatacattatatgtggtccttgaccctaagtcaatagtacatagtaaattccccaaatttatctatcactgtaagagtagataggtaagtttggtgcactcaccccaccgaggagataattgtccaaacagtttatttgagctcatgtcaatatagacaaggtttggatgaaggcccaactcggagatatctccttcaagttgatttcgctcaagacgaactctaactagggttttgcagtttagtaagcttgttggcaatggtccaacaaggctgttgtgatcagcagtgaaattttgtagccgacttgctgcgcatagtcctgatggtaactcaccagagagattattaagactgatttccaaaaactctagattcactaagttgccaagttcttgaggaataaatccaaaaagttggttagatacaagatttatggaatagagtttattcaaattccctaagctgttcgggatggaacctgtgagattgttatcagcaagtgataagttatttaggttcaccaggttacctagttctttaggaatgtgtctagaaagtttattgctccaaagcaacaagttggagagtttagtcaaattccctaagctgtttggaatggaaccaatgagcatgtttttggaaagatttaaattctctaaattcacaagcttacctagttcttgagaaatatgcccagaaagttgattgtgccaaagaaacaagtgggagagtttagacagattccctaagctactcgggatcaaacctatgaggttgtttaaataaagcgataagttctttaagttcaccaggtaacctagttcttgaggaatgtgtccagaaagttggttttcaaaaaagtgacaactcaatgagtttagtcaaattccctaagctggttggaatggaacctgtgagcatgtttttggaaagttctaaattctctaaattcacaagcttacctagttcttgagaaatatgcctagaaaattggttttcaaaaagtgctaagtcaataagtttagtcaaattccctaagcagtttggaatggaacctgtgagcatgttaaaggaaagatctaatttctctaaattcaccaacttacatagttcttgagaaatatgccctgaaagttgattgtgccaaagaaacaagtgggagagtttagacaaattccctaagctactcgggatcaaacttgtgaggttgtttgaataaagcgaaaaagttctttaagttcaccaggtaacctagttcttgaggaatgtgtccataaagttggttttcaaaaagtgacaagtcaatgagtttagtcaaattccctaagttgtttggaatagaacctgtgagcatgtttttgaaaagttctaaattctctaaattcactagcttacctagttcttgagaaatatgaccagaaaattggttttcaaaaagtgctaagtcagtgagtttagtcaaattccctaagcagtttggaatggaacctgtgagcatgttaaaggaaagatctaatttctctaaattcactagcttacatagtttttgagaaatatgcccagaaagttgtttgtgccaaagaaacaagtgggagagtttagacagattccctaagctacgtgggatcaaacctgtgaagttgtttgaataaagcgataagttctttaagttcacaaggtaacctagttcttgaggaatgtgtccagaaagttggtttttataaagtgataagacagtgagtttagtcaaattctctaagttgtttggaatggaacttgagagcatgttgtcacaaagccttaggccctttaagttcaccaggtaacctagttcttgaggaatgtgctcagaaagttggttgtgacaaagatccaagagcgagagtttagtcaaattccctaagttgtttggaatgtgcccggaaagttgattgccccaaagaatcaacacagagagcttagccaagttcccaatactgtttgaaatggaacttgaaagtttgtttatgccaagcctcaagtcttctaagatcgctaagttcccaacttcttgaggaatgcacccagaaagtgtattatatagaggtataaggtagtgattttagtcaggttccctaaattatttggaatggtacctaataatctattggaattaagtttcatggacctcaacttcaccaaatttccaatctgctcaggaatatatccagagaggttattatctgaaagatccaaggacttgagctctgttaacatattgatattgatcgttctgcaggagcagggatctgagctctttgagggacgcaccactccaagggatcctccccgtaagcttattgtgtgagagatcgacgcttgtcagcatcgtcagtgcagagaagttgaggacctcaagtgagcctctcagcctcattccacgcagagaaatcttggtgatcacaaatttcccttgtcgagcaccgcacccaatgccacgccagctgtggcatggccatgccttgcgatcccaggactgcaggggttcctgggtttgcagggtggccttccaggcgatcagcgctccagcttgctcttcgatggatggcatggcaatggcaggaggggcaaggagtgaggacagtagtatagctaatggcaggaccaaatttaggggagataagggatccatggcttgggtagagtagaggactttgctcaagctaaggttggtctgtgttgttcttatactggacagtgttgactgctactgtccatgatcagcttgtaagtctatatggtacagtgcttactaccgtaccacatttagttgcacattggacttggaaaaaaaaattcaacgatcgtaagataagtgaaagcaacatggatggaacacttacatgattagttctctggtctaatccaaacaaggttggagtcgagactcgaaacatgagattctcaagtcaattaagcaaatatggaagtcatcacctttctaaatcaacgtacccagggggcaagtagatatggaagaatggagccttgttcagattctcaagtcaagtagccttcctcccttactggttgactagttgttggagaaaaaaattgaaaatatattatttatttttctttttctcagaaatatcggggatttaatcttatttgtgtaaatagctgggagaccgagcggtcggtctagcttgctcaaccagcgagaccgacagcacacacacccttgccactaattagtgattaattatcttgactagccgtcaccggtacgttgcacggctatttatcgacacgtgtcatgaacatcaattaatttagttatatgttgaatgtgttttcttactatggcttacatgaaaagaataatccaaattaatcattattcgtgggttgtcttaagtttttcaattaaggctgtgtgtgtttagttcccttcaaattttcaaaaattctgtcacatcatatgtttggacacatccatggagtattaaatgtggacgaaaataaccaattacacagtttgcatgtaaattgcgagacgaatcttttgagtctaattacgtcatgatttgacaatgtggtggtacagtaaatatttgctatgacggattaattaggcttaataaattcgtctcacagtttacaggcggaatctataatttgttttgttattagtctatgtttaatacttcaaatgtgtgttcgtatacttcagcaaaaaattagttgtgaggctgtgtttagttccctttaaacttccaacttttccgtcccatcaaatatttggacacatgcatggagcattaaatgtggaaaaaaaaccaattaaacagtttgcatgtaaattgtgagacggatcttttgagcctaattatgcatgatttgacaatgtggtgctacagtaagcatttactaatgacggattaattaggcttaatagattcgtctcgtagtttacaggcggaatcaataatttattttgttattagtctacgtttaatagtcaaataggtgtccgtatacgaaattttttttttaccaaaacaactaaacacggcctaagctaataataaaataaatattgaaaagtctaagatggatacgacttcatatttaaatttagtaattattagatattacaaatctaaacctacaaaatccatgatatttccaacggtatgttttacttgtaaagtatatagccggtccctaaacttgtacgattatgtcatttaggtctcaaactataaaaatacatatccagatctcaaaacttattaaattgtgtcaatccgatcccaaactgccatgccatctccaggatcttacctggcatgccacaccggatgatgatgtggcagcatcacaaatcctacaccaactggcaagtgggcccttctttccttttttttcccatcctctcatttctccgtttctcttctttttcctctgttcttcccactgcatcgaccgtaaccatgccctctggtcgagctgtcacctcggtgacacgaacagcgcagcgtccacaggcaagaaggcaacggcgcggcagccgcgtcgacagaaggcgcgccatcgcgtgggcagtgacgttcccgcccaagccgagaacaccgcgaccaccaagtcgacgccctgatgctcctaggcagctgtgctcagtcggaagttctgacggagcgccgctgcttcgcacgccatcgccgcttgtacgacggaacaagatagaaaattggagaagacaaagtgaaaaaaaaaaaaaaagaggaaagggcaaaaagagaaaaaaagagagtttttttttaatgtgggtcccatttgtcagccaaagtagaggtattgataataccacatcagcgtctatgtgacataccacgtcagcaccatgtaagatgccggaacggtgatggctatgttggaccggaatgtcacactttggcaagttccagggtttgaatatgcatttttagggttcggggacctagatgacacaacgattcaagtttagagaccgggtctgtagtttactcttttacttaacataaacattaaaatattacatagctactatcgtagatattaacattaattgtattattccttcaacttttacaagcttaaagatttacaaattatattgctaattatatttttatgtggaatcacatattggtcggcacatattaaaaaatttatatgaacaatatgttgataacacgtgcaaatatgtgcccaaagccatcaataagaaatttttatcgtcgaattttttattggattgtgactccatgccaatatcaaacacaactcactattctcgctattgatttgttgtcgaattaaaaattattaaatggtgaaaaaaatataattaagactctctcttgatacttagtaattcataatttctaaactaaattaataaaaaaactccaaaaaaaacaacagtaaggctttagcgtgaattaaaatcagaatacaaagaaaaacataatgcttataaaattaatagcaatagcccgtgcaacgcatgggttgtcggctagtataattagcaatagattgggagcccatacattcccgattactcgttgttcttcttgcatcggcggtggaccttcccgattactctaggagcaggtacaatagaattgttttattagatgcaaaaataccatgttagattgtttggtgctttcaaagagagaagagagagaaggaatgcaggccacaaaataagcgccaactacaacacattcctccacacctggtgagcctcattccatgctcagctcttcgtgattggtgaaaccgtgctagcctgcgcacaggataggaggggagagagaaaaggtaggaaggagagaggaggttagacccactttatagtaaattatttttatagtcaagagattagggccatgtttctttcagcttgggattattataatctagattattgagtcagattattataagctagattgttataatctatagtagaataagcggttagttgtttctttcctagattattagagcagattattggtttgcaagtctaaagagggagtggggtggcatggtgggtaatttttcacccaataatctggaaaaagctcacctaaatgagcttatcagattataataagctgggctccagattataatatgctacttcaataagttgtctgtttctttcagcttactcccaataatctggattataataatctcaagctgaaagaaacagggccctagatctatctactcccttcatctcttaatataagggattttgacattttgcttggactgtttgatcattcgtcttattcaaaaaatttagaattattttttttgacttactttattatccaaagtactttaagcacaacttttcattttttatatttgcacaaattttttgaataagacgagtggtcaaacagtgcaagcaaaatatcaaaatcccttatattatggcacggagggagtattatagaaattacgggtctgtttggtacaactccagctcctagattcattttacctggagctggagctcaaccaaacggttcagattcgccaaaaactggatcggaacggggtggatcgctccaaaatattgtattgaggtggagcggcgaaaatgtagctccacggctccactccgaaaataattacagcactacccattccttttcactgaagttataggaaaatgccaccactctacccccttcgattccctcccgcattgggcgagcgacgcattcccaaccccttcctcgcccttctctcgcgacggtggaagagaaatcgtcgcacggcggtagcggctgcgcacgtcggtagtggcggcgcacggctgcagctcccttcctcacccttctctcacaacgacggcggcagaagcaactccctccctctctcggctggggcggcacgcggtaattgaggcggtgcatgacggttggaatggctccgtggctgcgcgatgcacagcggcgggtgtggcacactggggcgacggcgctcatggcggcggggttgaagcacctctaaaactatctatagatgacatgtataaactatttatagattacagcttacagctgtctatactattaaacttgctctaatggcaccgatcagagctgcttcctcggcgatcgtgccaaaaacgcgagttccttttggatttcttttttgaccaatgataaccgttgcattgtcatcccttagagggtattgttaaaagatcctcgattcctaatgcaattgatgtagtagtggcttgatggaagcccagtgtttttatttgatccagtatatgggtggtggtgaacctctcattcaccttcggtactctccgaactgtgcgggatggtttcccatcacacggctcaccaccaccacaagtagagaatcccaatgtgctttttactaggaagatgaggatgctattctttaaagaaccgagcttgacaagcatttcccatccatctttccccttcttgatgagcgcactacgactcattcaaaagagagagtaaaaggaagaatttcccatgccaaaggatcagaactgatcaggtctcaatccatttgtacttgcaatttcatcatgatccttatcaacacaactaatcgatacatttataagaaatgaaccgcagcgaaccctcagatgacccgtcttgccaaatcagttactggtcctaaagaatttgtatagctcatggtatgatatttgtctggagtttatggtgatgagaggtgtaattggtgtggtttgatcatctctcagttcaccgattcatccatccggtgtgatggacgactctccagtagaagatgtgacatcgtcgcctaataaccagaagaagcactccttcattgggcgtcatggaggtgccagtgctcacggatttttggagttctagagagcatggatgacctttgcagtttgcaacatcaacttcattgagatggatgatatgagttgcatcagtttcaacattgatgagttgttcggtcagattgtccattaattttgctttgtagaaagaaattcttctgtatgttggatatcccagtcctatggcttcataagacaaggatattcgacacctattctaacactataagtggagagggtgggagtgatggccaaacacagcggtggtgacgacaacggttggaatgggaggtgatcatgggagaagagtgacatgccgcatgaggcacggaggcggaaaaagcgatattacacattctctcaagtctactgaagctctgagaactgagatgacctgaaaattctgcaatttatcaggctccgttttgaatgtcaggcaaacagtaagcaattctcagcttatctcatgaacaatttcaaaaatgataaaaccaaaccgttttaagcagctactacttatcatcactgaaacataccaacacaaggagagcagagacaaaagatgcatctgaaaactttgatactaaacatacaattatacagtatttgctagaataggagaacaagaagcctcattgccatgtagtcagagaaaatggtagccatgtataccatccatcataaatcttagagattcgtattacaatttacaacaaagcagattgatcaaacaaggtagcatagtaagcacaagaacatcaccagcaacacgtattagggtcgtgtacaaaatgcaggtatgtttgacaaccacgcaattaacaccaacgaagtagagagaacacaaatcatcatacaagtgatgctttataatacttgacaagttgacattaacaggtgcaatagactgacctacctatggtgtgaattgccacattcttgtggggaaaaaaccctgagcaacatgagaaacagcaattttctgacaacattcactggtagtacgcagggatgattatgtcaacatgtagatggtcaggattgctaggtccttcagctgtagaaaacatccgagttacatgttgcattgttggacgacgtgatgggttggggtccaagcactggacagcagccatgatcactctaaatatttcacttgctgtctcagctttaggaagtgggatccgggcgtccaacaaatccttcaatgttgtactttccttggccatggagaaggacaaaaggaaatcaccaggatgatgccccatgaacagctcaaagacaagcactccgaagctataaacatcgcatttctctgtcacccttgttgtgtatgcaagctctgccatgtaaaaatttaagactttgtttcaacaaatttgcatatgtaaatagtatagaaggcattcgatgctatttttacaaaatgagatgcaaatttgcctaattgtatctaatatactactatgaatcaaagatatactagtaagacgaatactttaacagttagctcgaatatttgtcagagttacaaactaatatacaaaaggacagagcaactgatttagtacaaatttacctggggcaaggtaacctttggtcccagcaagcttcgtgcagttcgatgcctccacatctagaactttggctataccaaaatcagatatgcaagctctgaattcctgatcgagcaaaatgttgttgcttgttatatctcgatggactatgggtgcaaagcaatcatgatgtatgtaagacaaagcattagcaacatctttgacaatacttatccttcgcatccaatccaattcaatcgcaatgttatggttctccaaatatcttgacaagcttcctctatccatgtattcgtagacaagaaatttgccgtggactgcagaacagtacccaaagagcttcacaatatttcgatgccgaattctcgtcaaagcatctatttctcgcttaaatattagctcgtcatattccatcatatgaattttctttactgcaaatatctcacctgttggtaactgagctctgtagacagatccatttcccccagttccaatgcagtgagtttcgttgaaatattttgttgtttcaaaaatctgcctgcatgcttctcctccctcaaagttccagactgaaaacacttttgcgtctccaactccattttcgctttgttccccatatttcttccttttgcattgccatgccactagtgacatgataaacacaatagacatgccagcagcaccaactataccaagtaaaatggatttgaatttctttccctggccacctttctgattaaggtcgcaagggggtaaagctttgactgtaccacacaactttttattgtgcatgaaccactcaatcggagcttcttccaagaagttaatatgtggcactggcccttccaaattattatatgatacatccagggatgagagactgatcataccctgaaatgatgatggtatgctgccgttcagtgtgttgtgtgaaagattcagagcttcgagcatgctcaaagcacccagctgacttggtatgatcccagaaaatgaattgtcacttagatccaacaattcttggaggcttaccaacatccctagtttaacaggaatgcttccatcgaggcgattatggcctagccttagtaatctaagtttcaaacagttctcaatcgatccatgtatctgtccacttaggttgtttgatgacaagtctaaatactccaaattttgtagagaacctacttcctttggtatggttccctggagcatgttgtttgcaaggctcaaattgaatagagacactacgttaccaatttctggtggaatgtgtccttcaatttcattcgatgaaacatcaagtctccctaactgagacaatttccccatgctcgatggtatgactccagtaatacgattatttgatgcacgtagagtggtaagtttggcgcactcaccccagcgatgagataattgtccatatagtttatttgagctcatgtcaatatagacaaggtttggatgaaggcccatctcggagatatctccttcaagttgatttcgctcaagacgaactctaaccagggttttgcagtttagcaagcttgttggcaatggcccaaccaggttgttatcctgagcagtgaaattctgtagctggcctccagcgcacagacccaatggtaattcaccagaaaggttgttttgatcgatatgcaaaatatttagattcattaagctgctaatttctttaggaatggatccagaaagttggttagaacgaatatgtaaggcagtgagtttagtcaaattccctaagctgttcgggatggaacctgtgaacatgttttcactaaggtataagttctctaaatttaccaagttacctagttcttgagaaatacacccagaaagttggtttctccaaacagataaggtggagagtctaggcaaattccctaagctgtttgggatggaacctgtgagcatgtttccagaaaggctcaagatactgagtttagtgaaattccctatgttgtttgggatgaaacctgtgagcacgttgtcataaagtgataaattctttaagtccaccaagtaacctagttcttgaggaatgtgcccggaaagttgatttctagaaagatccaagaaagagagtttagtcaaattccctaagctattcgggatggaacctgtgagcatgttttcactcagatataagctctctaaattcaacattttacctagttcttgagaaatgtacccagatagttggtttctccaaagagataagatggagaatttagtcaaattacaaatgttatttgggatagaacccgtcaaggtgtttccagaaaggctcaagacactaagttcggtcaaattccctaagctgtttgggatggaacctatgagcttgttatcgtaaagttgtaggtcctttaagttcaacagggaacctagttcttgaggaatgtgccaagaaagtttgttgctttgaagatacaagaaacagagtttagccaaattccctaagttgtttggaatgtgcccggaaagttgattagaattaagttttaaggacctcaacctcactaaattaccaatttgctccggaatatgtccagagaggttattatctgaaagatccaaggacttgagctcctttaagttaatgatcttggttggaatggaatcaacaagactgttttgactaagattaaggtattctaggctcactaaatgtagcgcccgttccgtcgtggcgcctagcgggaaaattatctcttaaaaacctaaattgcgaaatttgtttctttgcttgttgtctagtgtccgtgccatctcagatctcaaaaccccgatctatcgtcgagctcatttccgaatccaaatccttcctaatcaaattcctccgcaaaagtctattttgcctcccccggggtcgatgggccgaatctcttccggcccatctccccctccctccccggcgccctctctctctcgctctctctccctcccccctccgctccgcctgcgcgctgcgcacgcgagcgcgggagccgcgccgagcgcccctccccctctgctctgcccgcgcgcgtgcgcgtgaccgcccgcgccgagccgagccctcctttccgctccctcgctgccgctccccgcgcgtcgttcgcgcgcgcgcccgcgtggtcgtcgcccgcgtcgcgcctgcgccgtctgcgccgcccggccccgctgccctgccgcgcctgcagccgctcggccccgcagccagcgcgcgtgcccgagccgcgccgcccgttgttttccgcgcgcgcgtgccgtggtggccgaccgcctggtcgccgccgccgtcagcctctgccgcgcctgccgcccgtgtcgtcgcgccgctccaaaccgccccgccgtcatcgcctcggccccgccactcccgcgctagcctccaagggacggaggcagagctcctcctccctctgccgcgtcgcttcccctccctcctccttttcccgaagaggcaagggggcaagcccccttttctctccctcttttccttttcccctccccgccggcgtcatccgcctccgtcaccgttttggccgcgagcgccggcgccagctcgcgccttgaccgcccaaggtcggttcccaaaccgacatcgtcgtcctataaaccaaggcgccctcccatcgattccccctcccgtttcgctcgccgccaccgcgccattgccgccgccttccgtgctctgtctcgcctccgccgttcatcgccaagcaccgggagagccggtgcgttcgtggacgcggaaggggactccgggcgcgccctctccttcctcttccccggcccgaggccggagagattactcccgcgccgtcggcctctcgtcactgcgcccgcccgcacggtagtgcctccctccgttcttcctcctcgctccatctctcccccttagttttcggtagtagcatgtgtagcctccccgtagctagccggcgccgccccgaccgttgccgccgctcgccatgtgctcgccgccgtcgccgcccgtgctccgtagcactcgctcgtcgccggcctcgctcggcgtagctccgcccaatccgacgctagcaacggattcccgtagccgcgtagatgctctcaccgccgggaattggcccctcgtgacctcgtcgccgcttcccccttctcccgccgccgcttgccgccgccgcaattcgtcgccgtcaagctccctccgacgaatccgagccgttggctcgtctcccctcgacctgagcaaccacccggtgtgctcgctttcgcctgtatcgccgtggttcgctccgccgctcgccgctgtcgaccgccgtccgttccggccggcgtcgtcgtctacctcccgccggcccgcgtggcagccacgtaggcgccacgtcggcgccagctcggccaagaccgggtcgagccgaccccggtcagcccctccccgtgcgcgcgttccaccgcgagccgtgaggctgcgcgtgggcccgccgcatccgcgtccaccacgaaccgcgcgcgtgcaccgcgtccctcccccgcccgcgcgcgtgcgccgcgtgctcgctccgcacggtgaaccgtgtcaccgacaagcgggtcccacccgggaccacgcgtggtgagcccgatccaccggctctctctctcctcccctcccgcgtgccttgggccgccttgggccgccttgggccggccggcccatttagctcggccgagccgccccatttctctcgggccgcgccctagccgcccgaggaaagtctaatttccctccctcttttcttttcttttcttttctttttcaaaaaggatttaattaaatccttttcctttagaccaaaaatccaataatcttagaaattcaatatcttcccaaccgtaaatccgattgactccgttcaacttccaaaattcctcaaatctcgagatctatctaatggcacgcttagaggttattaatagggctttattttcgccgtttgttgagttgtcccatttcgcgtgtagtttcggagcccgaagacccgcagtgcgaggatttcgaggatcaagctccagatctcgagcaaggcaagccacctttgaacatcttgagcctatatttgaatttaattatgttgcttgaaaaatattatgcattgataggatcgcacttaatctgttgtcccgtctgcaaggcagattggcagacctacctaattcgttgcatttgacccttcctttgttaattgttatatcatgtccccttgtaaccatctagttgcgcctcgatattcgtgcaccctgtgcgagtatcgacggtcgccttcaaacttaaaatctgagtaatttcttgggtaaaacttgggttttacaaaagacttggaaaacccgacactgggtcggtgcttgcgaactaaatgaatttccaaaaccgcggaccggggaacgtaccgggtgtacggtttcccgctcttgcacctaaggaccgtttccttggaatttcatccaaacataagacaagtacgaccacatgggtggaatgggacacccctggctgagtaactagcttatcagggagccttgatgccgagagacatgtggattcgccggggtggtgtcggggaggacccctgggcttcctggcacagtatggtctgggacctaacctgttgttggtctgggacccctctcgtcggcatatggtaaacctgtgtcggctttggaaatgccttgtcatgaaagcttggaggtctcccgacgtggctgatcccccacgggctgggtgatccgggttagtaatgtcgtgtgggtaaagtgtaccccctctgcagaggttaacaaactgttcgaacagccgtgcccacggtcatgggcggatgtgaggtgattcctagcgtagttttgtttgactactgcttgtgaaattgctgttgtggaaaggggttcgatgtttgaaaaatctgcagctgatgggatcagctaggcccgggtggccgtttgaaagttgttggcccgggtggccgtttgaaaagctatcggccgggtgccaaccttgtttcaattctaaagactgatacattgcacatactccgaccggacgagacgcactgtctcatccgtgtcgtttgagaagcactcacttagttgtttttagaaaagagttcaaataaaatcaattgcaaaaacaacagcctttccttgaagcctgcattaaacacttatttcccatggcttgttgagtactcccgtactcacccttgctctatataaataaccccccccccagttgctgaagaagatgaagcggaacctgctgatgaggagttcttccaggagcaagccggctacgatgagttttagggtttcggtctagttcccaagtcgcgcctgtgttgtttggtccaagtcctggcttccgtttcccttttgtaatgcagttgtgagctcgggatctgtccgcagcccaacatgactgtacctctactctataataaagagacctctgttgctgtgatattctgtctccctgtgataccagcactgtttcctgggactggtatcgattaacaggttaatttggagcgtcacgggctagttccggtcgggattagttcggggcgtaacactaaatctcccaactcatggggaattggaccagttaattggttactggatagtgctaaaacctttagatttgacaaagatgatttattgttatatttacctggcttgtttgtcatgaacaagctgtctagacgaccaataatgttgttgttggacaaatccaatctaatcaacttactgaggaacccaatttcagaaggtatatgaccacccagttgattgcttgacaagtttaggctcacaagcctttttagactacatatttcctttggtattgaactcgaaagaaaattattgcttagcactaagaacctcagctttgttaaagatgttaaacctagttggaataaggagccccttatctgatttttgtgcaggatcaaggctctgagctctttgagagacatgatactctgagggatcatccctgtaagcctgttgtgtgaaaggttgatgcttgtcagggtcgtcagggccgagaagttgagggcctccagtgagcctctaagcctcactccgtgcagagtgatcttggtgatcaccctttgcccttgtagtgtgccacacctgatgccacgccagttgttgcatggccatgccttgctatcccacgactgcaggggttgctgggtttgcagggtggtcttccaggcaataagcgctgcagcttgctcatcgatggatggcacggcaatggcatgaaggagaacaagtgaggatagtagtatacctaatggcaggatcaatttctggggagataagtgttccatggcttggctagagtagaggggatatggctcaaggttgttttgtaatgttctttccctggacagtattgactgctactgtaaggcactacaaggtatagttgcgcagttgttatttctgaataaatcagcccagcgaaagatcagcgatagagaaattaattggaaaaagaacaatgcattgaacgaacgatagcaaccaacttcaatgtcgtatcacattgccttgctgaatcaacgtattctagaagacatgcaaatggggaagacttaaaacttgagagttcagattgccaagtcaagcagctttcctccccggcatgttattactgaaatgatgttgcttactgctaaaaaataaagtagtgagtacttgttacaggaaaataaatgatattttcgagctattcataatttatatcccattggctacaggatcaattaagcaaccctaactactctacttaggattaccagatcagataacctcatagaccctcagtccaaccaaggtgatttcacatcaatgtggtggcaaattcatcccctgtagctcaatgctatccccaaggaaacagtactccctccatttcaaaatgtttgacaccgttgactttttagcacatgtttaaccgtttgtcttatattcaaaaaaattgtaaaatatgtaaaactatatgtatacataaaagtatatttaacaataaattaaatgatatgaaaagaataaataattatttaaattttttaaataaaacgaatggtcaaacacgtataaaaagttaacggtgtcaaacattttaaaatggagggagtattagaaagtgacggcagagaaattattacctgcattctctgacatgttcctcgttttcgcaccaaatgaggaccggggattccaccaacaagaacaagcagcagcgacagcagcagcagctcgacgtcgtcctgaatagctagaatcaatctcctccaggctccacctcgctgcaatggagagcataattaaagttccatatgggtcctagtagagagataattagtaaccaagattatgagtttaaatctccatagtaacgaattttagattagattgtttgcggagctaagttcctaatttaaatgaccgcatatatccggttatatatagaggccggtaaaaaatacccttcttaaaaaaaaatagagagaaaactgaactttaaccccgttcctcgcgcgctcagcatcgcggcagcagctacgccggatctggagtcgattttcaaggtcgttggcggggaggttggatggagtggtcgggggcggcgcggcgagcgttcattgacggccgcgcagccgaggagtgacggtgtgactcggactctataatgagtaatgaattaggcccatatagtcgttgaccatggattcggcccataaatgcgcatgaactcggcccataaacattttgggccctaattagtcgtcatttaggccggccttcatttggcacaatttcaactagggaaaagtatagtttgagtccctcaactattgaccgaatccaattcgtacccttcaaccgtaaaatcgtatatattgactcccttaactattaaaaccgatacaaaatataccccttggtggtttggaaagtggttttggctgatgtggcaagtttactagtctttatccaacatagaacccacatgtaagtctcatagaaggaaaaaaaaaaggcctcactagcacctacacgttgagggcgagctgacggtggcagtggcttgggccaaggtgtttgggagcggtggtgcactgtacaacttgtgacagccgagacagggccgagctgagcagagaggcacggaggcatcgccagcaagcttcgttggcggaacagcgaggccgaggaacatgtgccatatgggctcgtgttggcccagcctacccgtcttcttactaagttgtgcttgtgctctatcctcagcacgagagccaccacggcacgagccacttgacgagccatgcctaaaaaggatgtgccacctatgatttcaatacacaagtaggagtaattttggcctataagggtacgtagcgtaggggcctagtgattagttctagccctccacgtcgatgtcgtagctccacattggcttaagatgtgttcttcgcaaagccactcaggtcgtacagagggcacggggccttatcaaggtgagggcgcctgtgggggcatggcctacaagccccgttgggcaagccgtacccacatgatgcgtgtggtcccctatttcctgagccactcctcgcacggagctcaaagcagtggaacccagatctactagacttgaggaaagacgacaatgccgtgaacgggattggggaatgacatagatgctgggaggagaagaagggccttttaccgtcgctacagatttgatcccatcaccgtagagctcgttggtccaacctcgatttgtgccaccatgaacctcatgtggcctcatcaactagatttgcgccgcctagcaatatgctaccttcttagacgtacctcctcgccacgagccttgatggcgtcagcctaagaagggagagatggcggtggcggccaaagagggaggagcttgtcccggccttgatcttgcgttgcatgctatcgctgactggcgctgacccatctgcttgttgccaccccgatcagctgccaccaaatcctctaggaaagaggagaggagaggactgccaccacagtcggagaactgtagaattcgaatttgaacttatagagtgatatatctcatgatgatctatgtcttaaaaaatcatttttttctaactatttagatggcataaaaaatacaagagaatatcccctccagggataaaaatccatctccctatttttaagaagtaaatatatatacaatgttcttggagaggaaaatgcactttccttttatactgaacatgccataagaaagagtgatatatggggtgtcctcattatttccctccttagtttagagaatgtcataatttccctcagtatagagaatgtagtcatgagccatgacaactagataatgtgacatttctctccgacaaatatttctctagaggaattactcaagaagttcagaaagtactggaatccattcacatgcccatccttttacctcaatttatttacggaataacgactcaaaacatggaaagagaaacacgcaaatcttagcacaggcagaacaactcaaaacactcgtcagaggaggtcatcagaccatcgctctcagctcccgagcagagacgtcaagaaggccagccctccgatcaagagcatgatgttgaggaagtagttggactgcagaggcttgtccgggctgcctccgaatccctcgtactccgccctgatcttctgcttcatcgagtccgacagctccttctgcaaaagccattgcaagataccatgcattgtccatcaaatctagggctagaagctaggcttcgtggagagtgcatacctttccgtaggagtatttcgcagcgacgaagggctctggttgcggtgctgcaccgttgttgtcatccgctggcgatgatgccactgctgctcctaccgttactggtactggagttggttcagcttccttcttctcctcgactggtggaggtggtggtgctgctgctggcgctggtgctggttcaggatccttctcttcgacggctggttcatcgtccagtgaaaatccctgcaggaaaatcacatccatcacttcctgatcgaaggctggtaaagttggactctgtaaatatccaacctacaattgcactggtttttacatgaagaacagctaagaaaagctgccatagtaaaccccatttcgttgcattgcagaagaaagattgatatgatggactacctcaaactcccagtgtttggattacattcggtaaaaagaaaaactatctgaactatatttctgtcctgaaggtccagtactccatcttactgtcacataagtacattactgaattctctagaaaaaaaatacattacaaaagatatctactcgatgtggacgaggaatcagggagtcatgttttgaacttgcaaacaagaggaagaaaatctggcatgttctaataaaagaacttaagagcttaagtgtctttcgtattgtttatgattgtttaggcacaattggttgccaggagatcaaaatgaaaaaaaaagatggtagtcctcacctcaggtggatcgaactttgcaccaaggtcgctcagtttagcatgagcttcagcgtagtctttaaagaatgcctcctgatcctctgcatatttttcggcatatacctgcatatgttgcagatatttcagacagtgacctatgagctattcaagccacaaattgagcacaaccaaataaccttgaaggacggatcctcaaataatgcagcatctgtgggtagcactagaagatcctggtccctttgctcttttatgtcctgaaacattatcatcagctgaatcatcacatattcaaatgaaaaaaataattttgtaaaccatgacaaaatgctaacacaccttgaagtaactgttatcaaacttcaaccattcaactgtccatgattgccctccaggttcaccaggcccatccttctgtagaccacaataatagaagccacctttaaatgtcagtctgaaaactgaaactaatctgatttgctattgtgctggtgtgattaaggtaagattgcatcgaaaagttaatcttcatttccccacagagaagtatcagggcttagagaatgacaaagttgttagctatgaagttcttagcatcctaattctattttaccattatatgcatacaaaagaaacgtaaggataacccattttgtaaaatcctgaattaaaacattatttatttacagcataaggacaaagtattcacggattttaaaagcataatatggtgcttacttacaagataacacaaaaaagtacatgcattgttttcacctctgcctgaatgtctcaaaaaatgtaggggcaattgcaaatttaccactactttgaatcgttattgcaaaactgccactagaaaattgcaaaaatatcactagaactgtcattcgagtagcatccttgcaatattgaaaaaaccggtggcaaatttgcaaatgccccaaaaatgtaatattctatacccagagtgtagaacattgaaggtctggccatgcctagaacttcctactgctgaaaataacttatttttcctgttgagtttccaaagtggacaagaaaacatacagtatattttgtttctggctttccccagccactcctgtcaggtcttgatcttccaagtgtgtgtgctccagataatgcaacaatttcctgcataaatagtccaaaagaaatggttatacaacatacatgaagaacaaatagcagataggcaactaatttcttttttgcatcatccacaccttgtcatcaaggcccatcctgtagaatacctccctaagatgatcagcgggcacacgtggaccggcatctggggggcatttatcaacaccagaaggtcactctttgataagttcctctcacaattcataaatgcaaacgttgatcagaaacagaatgaagaacttaatggaaacactgaccaggaagcctcccctctggtgggcactgctcagctgctgtgacatcaactcgtccatatttcattggaattttcggcccaccagcttcctgcaagaaatttttctcaaaagattcaagcacatagactaccgatcatccaaaaaatatctagcaaagtcactagagcagagagaagaagtctgagacctcaattgctgtagcacttgccaactggaacaaatcagcataagttatacccgggtatttgtccttgattggttggataagcttcaaagcattaatcagacctatcaaaattccaaccaaaaccatacgattatgaaggaaatcagcacgattactccacgaatttcctgaattcgaaattgcactgccgagacacgagaaattaagtaccagcattggctccgtggctcaattcggcgtcaaatctcaagctcccgtcggctccgcccctctgcggccactcctcgatgttcttgtcgtacgtgccagaatcgtgccacccaagacggacctgtacatggtagcaggatcgcaggatttcatcatctctgactcttctctgttcatatggatgcgagagctgagatggcgcgggcgttccgtaccatgatggggtggcagtaggtggtcttgaggatctccctgatgtcctcccgggcgctcttgagctgcgccgcgtcggacgccgccaccgccgccgccgccatgcaccggaccaccgcccgcgcccccgcgccggcgcgcccgctcctcgtcgtcgcagccttctgcaggtgccacgcatcagtcaactcagaacacctcgattcaaccccccccccacccccaaaaaaaaaaaaacacgagccgagctaaaactattgcgaacctgcgggaagcgagacgggcgggagcggaggcggaggccgccggcgctggtggagcagcatgggaaggaggcggcggccgcggcggagacgcgggggcgcggggggggaggggacggagcaggcgagggcgaggcagccgggaggagggaggcggcgatgcgctccgccatggcgcgcgcgctcgagtcgagtgagttttttcttcttttcttttttttttttttgcctacttttttggaatttgatttggcacggccgagtcggcggcgaggggtgcgatgcgatgcgacgcgatgggttgccgttggtggggagaggcgtgtgtggcgcggcgggagcggagtctaatctgcgggggccaatagtgggtggacgcgtgggagggtgagttcgagatgattgtctttctttttctctaccttcgagatgtcgcttgaatatcggctcgattcaagtttggatagaaacaatttactgtattttgggttttctctccctcgtatttttcatggttgtagcggtagaatggttctagtgtccaaagtgtccttgtttcaaaaatgtcgtgcttggatatatatttcgtggggttacatcttaatacgcggaagacacgtggtgatgaaaaaaaatgattttacgataatggactatgtcctaaaatatagcaacttagaattagatgagactagtacgacgaatttggttagagatatggctcatctaattaggtgttatattttggaatagagggatttatagtagatcaaaagctaagaaataaaaacttctaaattgattctcaaaattaaaattaagttctaaaatttaaaaatagaaacccaagaaagtacgacataaattaagttttcacatagaatgctactattttatcattaaatgaatgctataattatagaatacaatgtcgaaaataagtgtatgtaactgttacacaagattagccatgcacataaaagctatgaattaattaaaggcaaaagtaacacaacaactcatgttagaaatttgggttcatacggcttttctcgtaggaattgctattttttttctttgcaactcctgtagatcgacatcgaataaacttacattttattattttttaatgaagttcatattgatagaacaaaaaaaatacaagattacaacactgggaggtcataaccagaaaaacaaaaaaaaataccaccacccacccaccgacaactccaacacataaaccctagagaaggctagcactgtaccggccgccgctagaccaacaaaggaactacaaccgagattgcccaaaacccagcccttataaccgacacaaaatcccgctctatccacatctttggggttgagggagatagggtgagagagagaatggaaccgctctccccctagaccctccgatgtggacaacttgcagaagctaaagcgccgacataagaagacgttaatctagagcgagcttgcgccggctatttcgaaggtttcggcaaggggatgccaaagacaatgtctccaaggagagaagcgacggaagctccgccgccgccgacatccgtcaaggtctcaaagagaactgagactaggctttcacctggccgtgccgctagaggggttgagacggcacaacaacgccctcaagaggggagtgatgctcgaaacgccaacccgaccaaggccgggctgggttttcacacgttgtccgtcgcctgcatatccacagctgacacaccattgctccaccaccatctaaacctccgttggcgtgtgggcaccactacaccggcgcccccgccggccagcctcccgatgccgccaccggccgtgcctcatcgtgtcgcactagcatgcacctcgccggcctccacctctgccagcctcgcctcctgctgtgccggccacatctccatgcgacatgccggcctccgccactggcacccgagcctccctgcgcctcctagcgtcgcggccacgagccagacacgcctcgccagcctccataccggttgcgcctcctagcgcctcaccagtctcctccgccatcagccgcccctccgcacgtgcaccgtgccgccccatcaccgtcgatgtcgtgcccgaccgcgccactgcgaggcttggccgagccgcactaaaaggtcgcgtagtcaccgccccgacgggctctcccgctgcgtgctcgccctcgcccgatctgatcgccggggggccagatcctcctctgagggcgctagatccacctccagcgcgaccggatccgccccgtcattgccatcccggccgccgttagccaccgatgcctagcgcagctcgcccctcctgtcgccttcgccatacccaccatcatcgctgtccccgccgccagccaccaccccaccaaatccagccatagcgacgcggatctggcggtcaccaccgccactaccctaggcggctcccttggccgcccgagcgcgagaagcgagaagccccgccaccgccgtccttgtggccgcgcagctttgccgacggccactcaggtggcagcgaggcggaggaggaaggtgggggagagggggcaaccgggtcgtcgcctcccaagccgcccctagaggagggcaatgcgagagttgtctgttctatgtaactagcaatgcactttaccaaatttgatatgaattatagtcagttagttacatctatgtccttttccctatgcatagaaaagaaatgtgatgtctaaatgatcgccaccgtgctatactatgccatgtccaccactttgctaacaatgtctctaggatagtaaaaccaagatgagaaaaccatcacaacagacaaaaggagcaaagatattcctgcctatatagaagttttagtccggtcatctgtataaatagtgatttggaatgatttcttctattaggccatattcggttaatcctcatgagagagggattagagataatttatttcacaaccactgcggtatggaattattcattctcaatccctctaatcacctttaatcatctccaaattgaataagactgtaggtaaaaagtagaaaacatctacattgcaacatatttgtcgataacttttctcccagattttttccaaatataaataggatataattgtagtataattacattgtaatttgcacgtggctataatatacggttgtatgcaacttttaaaaactattcacgagaggttatgggatcgaatcccttacctatgtgcatgttgtaattttctccttccccatttgcacaaatcttagagtaaattgatggtctaaaattatgtaaaatttacatacaagttatattatgggcctatttggggagctttagattctgagaagcagttgtttggtagccagcttctgagaatctggaaaagctctgaaacccagcttctccagcttctggcttcttagttcatttttcaggatatgtaactacagattctcagaagctgtggaagctgcagccatagttattaagaccggaccggtgatcaaaccggtaaggcactcgggtcattggtttattggtcggagtcaaaccgccggtttaaacaggttcaattagatgtttgttatattggtttcacaataagccgtatagcttagtggttgaggctttccgtggaagcatggaggttttgggttcgtatccaagttctgcagctttttccgtattttttctccaacttcacgtgatggtcctattctaataactatggtttgtatttgggaacggatatagtagttaaatttaggttacactataattatatagtattttacatttgactagtaaggtgcccgtgtgttgcaatgggaaatgctatatatcaatttcaaattatactaagtgaatgaaaatttgttgaacacagggaaaacaattctggcaatccaaagaaactacaaatcataattgttatcaatgaaaaatacaatatctggaaatacttgttgttctagattttttgtttgtgctttaatttgtatgacatcattaaattttgggaaaatcccttatatgccactgaaaatttgtctgatcccttgaatgccactgaaaattggctcttcccttatatgccattggttcaaattttcgctccctctcatgccattgccgtccgttgactggtagttgactgttgataggatgtaatcacttgtcagtttttttactgaaatgacaaaaataccctttggcccaaacatgagaatatggcccaattgtccaagtgggccaagcccaacatccctctgatgcaccatgtcagtaagcctgaacatgtattttggtactgtgtcagtatgcattttggtactctctggtcatttaaacagctccctataatatttgttgcatattctgtgctactgtgtatatctccttcctctagcaaacaatctgtttgttattttagctgtttagccgtgcattacaaacaatgtgcaattacacattatcttaaatgtctgtcagaagcaatctattatattacttgaatgttttgtcgatactgtgaaaaacagagaaatgttgtgctccctagtaaatattgttgaagcttttgttcgagaagtacatggttaatgtatgtgaaaaatacattaatgccataacagattgctttgttctactatgaaaaacagagaaatatgtgcctcaaaattatgtgactgaaaaatattcatatattcaatatatagattaatgctatacattcatatattcatttattccaaatatatgtgatgcctagctaaaatgtagtatataactgacatactaacacctactgcatgcctatcaactcaagaagggcaaatacgtcatttcactctacagttaacagtcaactaccagtcaacggatggcagtggcatgagagggagcgaaaatttgaaccaatggcatataagtgaagagcttattttcagtggcatccaagggatcagacaaattttcagtggcatataagggattctctcttaaattttcatagcagtcttctatctatgttgtctttttataatttaataaacaccatgagattgtttcatgccgcagaaagctttcattatgcttatgtaatgaaaacatatttctgttttgaaattaatctgcatatgtgttcaacaaattttcactcaatgaatatttgatatctattcacttaacataatttgaaattgatatatagcatttcccatttcaacgcatgggcaccttactagcatatgtaaatagtgataaatgaaaagctgaattctcagtactggtttctgaccagctcaagtttgcgagcttgggggaaattgcgacagccttcgcccttcgtcctttcccatttgatttgatcttgccaggcttccttttacctgcatcttcttgaaattcatcagacaacttacatatgattgcaaacatcacatattttagttgtgacaagaactacatttagtaaagaaatgtatgtatttaggacaatctaatatgcaagtaaactggctgttgacactgtaacttcgcaaacaggtctaccacattccattcgtaacacacgatgatcaaattcagcctagatattaatagcgtatcttattattttagattgagaaggcagaactaaatagagacgatatctgataaatgttactactccctccgtttcataatataagactttctaacattgcccagatgttaatataacacatttatatgtttagattcattatcatctaaatgaatataagcaatgctagaaagccttgcatcgtgaaacggaggaagtactaaataagcatagcagtacaaacagagagttacatcatacgataactgatactgcagtgcatccttctccttcctaactttgtaaaaaaaatagagagatatagaaagataaataattggagctgaccaacttcgtcgcaatgaaaatagctccactttttatcagatcctcctacactcctttaatctctgggagtgcgcacgagatggggagcgcgcgaggttgaatgcggaggaagggggcgccggcagtggaggcatggtgcggcgaggaggatggggcgcggcgatgtgggggcggcgcgaggttggatgcggaggaaggggacgcaacaaccggggattggggggcgccgttattttctcgctaactgcgggtcgcgatccggaggaggagcgcgatgggatcgcgcattcctcacctacggattaagtagtagagagtattttttgagaaatttgtcaatggatatgcatagcaaaaaaaatcgaaaaaaggtaaaccctcttatgcttatcttggatgggccgcagtgatgcccggatggcccaatatctgggcccgaatacttcttccaaaaggcccattggagacgtcagcccagccactccgccggaatctcctccacttctcccggagcagcggaaacaaccccgccgccgtcgtcgtctctctgctcgccgcttgcctcctcctcctcctcgccggaagctccagccctcctcctcctgcagcagcagcgagcagcgcttccaggcttgatcggtgagtcctccgccagccacccgcggcaccctccctcaaccccatgttgtgatatgatgttgcagccgccgcgaggccggtctgtctctcggccggcgagcggattcttgttgttccaggcgcgcgcgcggcttgtcccgctgttttgcctagcgatctttggtcagtgcagtgctgctcgcctctgtaggcttgagtgagtcggtggccgcaccgcgcacaacttgtttgatgatatgcttgcatgcacaagagcatctccaatcaacagattcccaaaaagagaaccattccctatgtcctcattggtcgtgcttgcctctataacccgttctttttctaattaagatgcagtttcaagttgctctaaaatattaaatatatatatttctcaagtttgtaataattaaaacttaattaattatacactaatggttttcttgttttgtgtgcccttaagttcatcttggttcgaacggggcctatgtgtgtttggtttaattcttcactcctttcaatataattgtttcagatatgctaatggagtagtaattgtgatttgaataaatttgggtttttcatgaaacctttgtaccattaaaaaaatccgtggttgtgtgcaagtatgtgcggttttccggaactttaaccacaaaaaatggggttctctgcaatctactcttcaaattatttattccgagtggctatttttcttatctctacatatttgctcttcatgatggttttcttcctctagcacatcacaatgagaggctttcttatgcatcaactcttggattcgtcatcatcagatgatgatgatgaactcattctggcagcagcactcatagcacaacatcaatatgacattgacaatgcaccacggcgccgtggtggttctgtacgcaggtttgtgttcaggacatttgttttattcgcatttgttgttgctcgtttccattggttcattcttcttctattggcaagtttaaaatgacttgttctctgcatacatgtatatagataccttataacatagtaccaaaaatcactggttccacaagccttcacaatggcacacaacatagcaacttccaatcactcctcttgaacacatttcacagaaaattgcaggttcttaaacttatcccctttttaaaaggaaaaattacattctctaaacaaaagctaacagctcgtgcgaaaatcaaattacgtatgactgtatcccagagctaacagattgcaggcatattctttttcacacctatcagctaacggcaaaaatcacattttccttctgtgcttcatgtgtttttctacaaagattaaccattgctgccaatgtttttccacaaagatcacatgcatatatttctttttcacgacgtatgagaacaaatatatagcaatctgaaagaattgatcacttgccaatctaaatgaattcccaaaaaattgactatagggaatttggtttgggtacctgttggagatgctctaagaggctaacactggttcatcttctgactttagaagttagtagtttgaagttgtcttcatgaatggaggcctatgcgatatccatacgcaaatgggacgaattttataatcagcttgactgcttgagcttgtctcaggtctttagcagtccttttttggttgtgctgcagcctacagataagacaggtgttctattcaaacttgttttctactaatatcaagaacctaagtccaatgcttcaacagatgcccactggtcggagatgttgaaagtattgatgtgtatattatttatagatcagtatggtagtgtgtcactttagtatgagcactacatggaatctgtaggactgttttttctggtgtttttatgtttccctacttaatttgctatgtttttgtagaaatatgggtgttttttttccttcaatggttgagtacgtgaaaggaatgttgcttttctagttaaagaaactgactcctgtcagcccatctcatgtaacagttccaagatgaaaataacttggggtaagaatgctaagacgaataggcagccctcagtggcaccatctaagccaggcctaccttttggggtggacagtgacaatgatgagacagaaaaggaggaaacaagagtggttaccacggactgtcctggaacaaagccatctgataatgctgagtccctcaagcaccaggggaacaggctagctgaggtatctttcttttcttttattttcttttattttcttttcttttcttttaataatcagccaaggtatcctctactctccttatctatgttacatggacaaacttatttatttacttaatattgaaggactcaagtattcattgttttcactgtccctacaaccaaaccaagctctctaggtcattagtcaatatgtcatagactcatagttcatggatattatattggcagttattgatgccctttcattttagaaacacatagtaaagcaaaaaaatgaactgggccgtcccaggtatacacaagatagtccttgaagcctcatacctttttcaatccatatactttggttactaggattctatgaagaaatactccttttctttgtagagaaatatgaagaataatggatctccgtagtccatacttctattcttatagaatatgcaatcagttatcttggatgcacaatttacacttgaaagggacagctggctgtatttcattttttacatcaaattccttttgacagtatgtactagattttatttgcagttggggcctgcacctgcagggttacctaacattcagcacacgctaaacgataatttaaaaggcagataatggttatcttattgttattgttttaggaagggaagtaccatgaagcacttggtaagtgggaggctgcacttaccttgatgcccaataatgcaatacttcatgaacagaaagctcagattctacttgagctgggagatgcatggcgtgcactgacagcagcaaccagtatgtatgctcttgttcagtttacttgcccttttaaggattctaatgataacgacctactaggatgccatgagttgggaacagtaccatccttcctaattggattatcattttagcaccgatttgcggtatctaggatttactcaatccatgttcttttttcccgtcaaaagtgtgttttggtggtacttttaacaggtcattgcaaaatgcataaaacatctataaatagtagggcctcaatcaagaacaaagaagaattactgcattccatacataaaaatgaagaataattttaatttgtgaatgaattactgcgcagttgcctattttggtcacatgtgaagtctatattagtatatgatcccagcagcatatttgtgtcatttccatttctccacttctggtatattaattactctatgtcgggtatgcaggggcaacagaattggatccattatggcctgaggttagtaggcatccccagggcagaaacactactcctggagtattacttaatgcgtgaatcctatcagttctcagcccttatatttatcagcggcatgaatgagatatgttcatatatattgacttgcagggttgggttacacttggcagagcacagttaaattttggggagccagattcagctatattatcttttgacaaggcgttagcaatcgaggtatccattttgctttgcaaccaactgcctgttctgattaccatccatgcatccgttagctgcgatatatatttctaaaacaacaagctatcatatataagtatcttattcccctcaaaaaaaattatataagtatcttacttttcctatttgtttccacagcctgacaacaatgaagcaaagtctgatcgtgaaactgcagcacgtcttgttaagaaacgagggcagctacattcatcaggtctgagtgccaacaaaagacgattcacagttggagaggatagcgaaaaggagaaagacgattcacagatggaggatgtagagaagtgtaaagaggatgaagaaaaggagagagatgattcacaactggagaatgtagagaagtgatttaagtcagatcggggctctcggcctaatttgttagatcgaggcattgtctgaagtagaaatttcgtaggaaaactttaaattcctacattaagacaggtctagatgtatatatatgtagacggacagaaacaatgaaaatgtgctgatcctccagtttaatccagttctttgggttttgggataaaaatgtcatatgcattgagatatggatggagactcgatgtttgcgttttattgtgctaatgactaaatagctatatgttactcctgtctcaaaatttatcatttctagttatgaatatgaaaaggtgcttaatcagatttatagctaaaagttattatattttgagacggaggtagtactaatttgtgataattatttgagagtacaaatgaatgaactaaccattataaagttgaaaaatggattaaaagcagtttttaagaaattcaaagttctgcacaaatcgaatggtttagaagtttggaaattgtgcgcattcatccataagtagaaaataacaggggagagggtaaagtaaagatggacggctagaattactgattttactagggagtgggggtctgtttgccgctttctattactggtagggatggaaatgttcggtcattttattattattatcttttattattacagaaatggtagtaaaattttgaacttaggtatttattgtcaactttaatgcaacgatgataaaaaatagaaaaactaaattttagaaacggtaacaggcggtagagatattattattattatattaagaataaattttagataaccgtaaatttaatgactaaaatatcagcttgctacaacattactaatatattttatagtttgctccaagtccaagagcaccataagctagtgacacatagagcccagacgacttgttagcatagcacattagcacataccccctccgttccaaaaagagtttaatcttagctatgaatctagacatacatgtgtccagatttgtagttaggagttagttttttatgggacggagcagtacgttgtagcatcatgccatgtcggcagaggaatccgctaggtcgacgtaatcgggtcaaaacccattctaggttacggcaatggtacttttgtcttacactctactcttttgaagcttgacgggttttgacttggtgcactgattaagtacgagtggcatttcaatcggattagatcattacaaggcgtccaaatcaaagtggcggacttagcagtctgccgacacagcggtgtcgctgcaatgcacaagccgacgtatcatgctgacatgtccctccgtccctcgcctatgctgggtaccacctctatgacatgtgggccccaaatgtcagtaacattgggatgccttcaaagttatggttttgtgataattttctccgttatcattacatcaaactgttaggtcgctaatgttgtagcaaataaataatttagtgactacatttgcagttatctgcaaattactattatattaattttatgaaaacagtatcggtaatgaccggaaaatttccgtaccgttttcacccttaattccttcccgttatgctgaggaggattactgatactgggcctaaaatggccttggacatcttttccacacactaaaatggcctggaaggcccaactgaaccatcactaattcagtactactactactactattctgatttgggaattaaaacctccaatttaggtcgattccattcgaacattcctcctccaagactccacaagtccagagggagaaagtgtgagaagaatgtggcggaaggggaacaagcggttcggcggcggcggcgagccggcggccaagcgccgtgccgccggggacgacgggccctccgagagcgccgacgacgatatcgtcgtcgcccaggtgcttccctaatccccgcactcaaacctcactaaaaccctagcgcggcggggatcttcattttcatttttttttttgggggggggggggggggttggtttggccatagatatcgaagaacaggagggtggcggtgcggacctggaacggcaaggtcgtcgtcgacatccgcgagttctacgagaaggacggcaagaccctccccggccgcaaaggtaatatcacagtgaaatcttcctcttctctgtcttcccgttggttggtcccctatggatgtgaatagcacgggattggattggccaagattcgttaaatgttgctagaggcatgccacctctagctttttgagtagatactagatagtaccacaccatgtgttcatgtcttgtgaatgatgatgttgaattgttggtgtcctgtttgaacgaatgatttacatgggagataatctaggctgcaagaaaaaaagggtgaggttcgtttcttgaactaaatgcgggacgctggtgagacgagcggcttcgttagcttagataccccatgcccgctggcctttaggaccgtgtatgattatcggcgaaatggttgctttccatttttgtgtttgtcgacataatgattccttaatgtattgtgttcgaagttcgaagcttgagctggtggtcatttgcaagtataaatgaacgtgaaagtctgaagaacccatcactgattcacaattttaggtagaaaattgttgagggagaatttaccctgttcaattgcatatgccctcaacaatatgggtttctctcatctcatcacctgtaatttgagaccatctactttggggggttatcgataatactcctattcacagtcacccaagttgatagctatgaatgagttttagtctggtattagattccaaagagtgtaatgataagtttgcaaacaaatattccggggctttcatatgctttttctaagcccagaacatgggttccaattctaaaattgattccatatggtagataacacagatggcatggtataacataaaagtgtggatgcatagtaaaaaacagtggttgtgtaatttaattccatatctccagcaccagcggtaatgtgctcaagataagcaatagtttccctgattactaatattgtgccttttcccttcttttcaggtatacagctcccgatggatcaggtcagtgtttttatttgtcctatacacgctcacgaaacttgattcccttaaaagatactcctatatcattatctgtttgaatgctgcattgtggatagcaagtaccgcttatgaaaaatttcctaacaagcttcacatgcttagatatcctgaactcatcaggagatagtgctatgcaagattggtgagaactacctatctaatttacgagaatgatctcaagtatattatatgccagatatgatatgcatactgttaaattctggcctctagctgcactgaaacacaaataacttatacctgtaacaattcttattgctagccataactttttacatcgcaatctagttcataactactgtggtaaccattgtgatcttggttactgtactagcaagttatcagttcctcccaataaacactcaccttctttttaacatgtgcagtggaagatactgagggacaatatcaaagctatagatgaggccatcaaggagaatgcgtgatcggagcccattctcttgtgatgcaagtagactaagcctacgtctgtcttttatgactccgaggaatattgcacttttggtatggtaatcttcattaccctgtctagtaatatcaagtaatgttttagtttggtcatgcgcggaaaatgtggccttgtctggtattgtgccaaagaagcagctatgtgcctaatgtgctctcctcattttgtacgttgggtaaggaggtccatctgttaatggttggttggtttctgcgtgtacttatgttttactttaaatctctaatgccgctttgtatttgcttgtgaaattttgccatgtcggtgggaatttcactatttttagtggaatgcgtcaggttcgaacgggccttgaagaaggtaatgcgtaaggtgatattcagactgcatagcctagcctagtgtgtggacacgctcaaagccctaaccaaccttttttttccagtggcttcctttccatttgtgaagaggatacaaatgactaaattatttgttatactattaatatactcgtacattattacggaacatatatctatattattagagatggcctacaagagtaaccgaggataaaatattggatttgactgttatttacccagagtatagggacgtgttgagctacgggagaaggagaggggaatctattaatgcatctttatttataatagcataggcatttgtccactcgcttccccaccctcgttgcacggagcacgctccatacaccctactctctctgccaaaaaaaaaactcagtatttagatgggacataatttagtataataaatctagacatatctaatacttcattcgttgtcattcgttttacaatgtaagactttctagtagatattaatgaatctagatatatatatgtgtttaaattcattaatatatatatatatatatatatatatatatatgtgtgtgtgtgtgtttaaattcattaatatctatatatatgtggacaatgctagaaagtcttacattgtgaaacaaatggattgcttaaatgagatataatatagtacaataaatctggacaggattatatcacatccaagtactagattgggaccatccttcctgtaaacacctatagaaaaataactaagatatagcttatctaataagcagctggatggtaatcactcaacttttgacttcgaattcatttttggattctgtaactacaacttataacctagataaaaaaaaagctagtttatttgggggagtttctgattctatgagaagttaccactgctaaaaattcttctaaacaaaacctaggtaacgtgttttctcactgtctaacctcgaaaacctctggaaaatagaaaaacataatgagtaagagcccctttgattaataggatttaaatcctatagactttttcccctaaattttcctttgatttatacaaaataatatataggaaaattaccaaaagatatgacctgtaaacttacctttatttttcctataacaccatcagaagagctcatattatcgtttcaagtattttttttatatgttttattctatcatgcgaatcagatagagcctaaaatataaggaataagttcaccggaggtccctcaacttaacagcgagattttttaaggtcccttaaccacaaaatcagaaatgtgtacccttaaactatacaaaaccgttcaaaagaggtcccaaggcagtatagaggcctgatttcactgatgtggcatcctagtcagcaaaactagttaaaataaatatgtggggcccacatgtaagtgagagaaaatgatgtgtgccccacatatctcctttcttttctttttctcctctcctctcttctctcgagcgacatagggggaaagaggcggctggcgcgacggggcggtgggagaggaggcggccggcccgacggcgacctcggtggtggaaaggaaccgcacatggcgcaccggcgggggagaggagcggcgtgacggcgagctcggcggcgaagaggagccgcgttgtggcgcaccggcgggggagaggagcagcccgcggtgtggcagcgggggcggcaacgggctcggcgacgggcacagacaagcgagggatgtggccggcagtggctgctgtcgccactcctttccttcgccgccgcgccgcgccgttcctttcccccatgagctgcttctctctgttgcgagctcgccgtcgcgccgactgcatccgctcctcctctctcgtcgcctccgtcgtgccggccgaccgcctcctctcccgtcaccaccgtcgcgtcggtggcctctctccccctcccccgtcgccactcgccccgtcgcgccggcggagctcgccatagtgccaaccgcctcctctcccgtcgccaccgtcgcgtcggtggcctctctccccctctcccgccaccggccttctctcccccatatgctcgcccaccgccgctcgcccctccgcgtcccctgcttcgcccacgcctggagctgtcgctcgcctaccgcttgccgccacagcctcgctcactcaccgacaccgccgctccgcctgcctcctcccgcgcgagagaagaagagacaaaaagcgggacccacgtcattttatcgcttacatgtgggccccacatatttattttagttatttttgctgactaggatgccacgtcagcgaaaccatgctgttatactgccttgggacctcttttaaacggttttgtatagtttatgggtacacattcttggttttgtggttaagggaccacaaaaaatctcgttgttaagttgagggacctccagtgaacttattccaaaatataattccccactgtcaaacttgaagcccattcccagtcgtataagcccatgaacccatgaatcaaaggtccattgaaatgcatatgcgtactactccgtactagtttagcagaaaatattagaatcacaaatgcccatgttaggagtagttttcccttaataaacaaaaaaccgtccaaacacaaaggaaaatggaaaatggaaaatgaggtgaggttggtggggacttgacccctgactggggctttcatgctggccgtgcgtggcgccgtgggtggcgtggtcaaccgggggatgattcctgttcgcttttctcttttattactcggtccttcgctttgaccatttcagaacctactgctagtaccacttctactactagtaggaggaggagtgcacgtcacatcccgggggggaaaagaggaagtgttctttcacccgtcgggtgaattgactgactgacacttgggtcaacgatctacaatgagggtgacttcgctggctggcccacctggttttgactgggctggcccacctggttttgactgggggtggaactaagcctgctaatggactggatgtaaatgggtggaatgggttggatttctaaatggactggctttggttggattcaaatggggcaatactcagaatggactggagcggtttggattcattgaaaaacggtgtgggttggtttggatgtggttaaaattctttcgggtccaaaatggattgtaaccatggattcaacccatggatacgagtggattgcactaatggcctctgaatatagtgatcagtacaaagccaaacccagcagcagcaaccagcgaagtgtgtgtgaggcttaaccaaagcttaagcccaaagcaagcttagacacacacacacaagctagaaagcacacttaagagacgcagattcatatcagagctcgtagtcgtagcagcgccctcccccttctaaaaccttctagaactgcccaatgccgctacaccaccacgccgccgtcgccgttgttgacgacgacgacgaggccaagccgcgcctccgccgcctccccgccgccgtcccgtcaccgccgccgctgctgctgccgctcagcccgacaccgaccaccacgtcgtggacgaccaactcctcctcgattgaagcgccgccgaggaggggaagccctaggaaggaagagagaaagcgaagggagagggagggaaaggggaacgagctgctcgatctttacgaacgcggcggcgtcctggacctttcctcccgatggtgagtggtgacgattgatgaagattggactgtacgtggactgaacccatggatataaaatgggttgaacccattaggctggaatggtttgggttagtttggcctggaagtgcttgggggttggtttgggttggatcttataaatgggaaaatggtgtggattggtttggtgggctgcctcggcaggtgttgggttggattggttttggattggatttagacccattggcaggcttaggtggaacccccttcatcgcatgacagcgagtgtaaactgtggagtagtatggctcttgatatgttactgtaagcaagtactccctctgtgtctcatattatagtaacctagaactggatggaacattttatattacaatgaatctggacaggaagtatgtccggatttattgtagtatgaagtgtctcgtctggtactaggttgctatattatgggacggagggagtacgtaaaattgtaatattccctctgtctcagataagcgcatcgcactaagggcctgtttagttcacgaaatgaaaatttttaggtgttacatcggatgtttaaccagatatcggaagaggttttcggacacgaacgaaaaaactaatttcataactcgcctgtgaaccgcgagatgaatcttttgagcataattaatctattattagcgcatgtgggttactgtagtacttatgactaatcataaactaattaggctcaaaatattcgtctcgcgatttccatgcaaactgtgcaattagttttttttatctatatttaatactccatacatgtgtccaaagattcgatgtaacctttttgggcaaaattatttgggaactaaacaaggacttagttttcagttgctcttttttggccgtatgaatactcatgtaagtggataataaatctgattagtaaatattactacaaaattataaaaaaaagttaacaggaatgatgataagcggacataaaaaaaaaacttgcttgcctactccacttaggctgtgttcgtttccttgtattgggaactactccctccattccaaaatataaggcataaccacctataatctaataaccaagaaacaattattatcatctctttgtttgaatcaatccaattaatacaatacatgcacccaatagaattaaacatcatgtgagtgtatgatttaaaaaataataatttagaagagaagatatgctaattaattaccatgcatgcatgcacacattatattatgaaacacctttaaaaagtagttgtgtcctatattttagaatggatggagtaattcctttcacacggaaaacaagataccttattagcataggattaattgcgtattagcaaaaaaacataaaaatggattgatatgatttttaaaacaatttttctatggaattttttttaaaaaaaagcattgtttaatagtttgaaaagcttgtgtgcgaaaaacgagaatgatgttaggaaagttgtccaaagagcacagcccatgtctctggattttattgagctgaaaaattagaacctattttgctgagttttattttctacccccttccgtaaaaaaaaaaccttgggttgaacctggacacacaatgtgttcagattcaaacccgaggtttaatttttttttaccgagtatgaatctggacatatatgtatccacattcaaatccagttttttttttttggggggggggaggggagggacagagcagtagggcttataagcagcgacacatgatcgaagcaatttaaattataggtttatattcctactttaattttgtggtttagaagctaagactaaaaataaatgatgattaattctaggttaatatatgatcatattgataacatatgagtgtatttttttctattttaaaagaaatatttgcaaccaatttaattggataaaagtccaaaactaacgtggattgagtatctggaaacatgctaaacaatgccttagattttaaatatggttatatggtttgtgggttaacaaaccgccaagcaaaatattagggttataatgtaaatgcataatatatatagcacaatatactccggtgcaccaattttatttttgtatctactgtgtatgttggcagagttcatggttgattttgttctttttttgggttaattattgtatgaaaaaaaaagtgggatgattgcccattatctatctcaagaaatgttagttattgacaatgtaggtttagatatagagactgtattggggttataatccattttcttaaaagagaagaaacgttagttcatttgaaggaaaacgtgtcatcatgcaaaacgcaagaaagtttagacgggtgagaataaaaatgcaaaattagagaggatcatgatacaccaacctcgaacccttagagcaagggcaataacacagcccgttgcgggctctaaacattagcaactcaactatagcaagcactgcaggcaacatttataataatcatttatactctaaaatactattattttatctatcaatctgagttcaacttttatattcgattcgctatattttcgatgggtccaatgatgatccaaagtgcaggatgcatgagcttcggtgccccgtgcatgaccgttgactatgtggtcgaattggctccattctctctcctaattactatcccctgcatgacgtacccaagctaataactgtcttgtagtctattatacttgcccttagagagttccgtcgcaatccttgttactagccaccatagctctgtttttttttttcaaaaaaaagtaccacatctcattgtactcatgactcggtgaccgtctctaataatacaatcaaatttcgagacaaaatataagcccaaaccttcgaataaaccatcgttgttttggtcactaagagcaggtacaatagcagactataaatcagctataaacacatttcaagaagtttttttagagaagggtatttttttacccggcctttgcatccaagtggatatatgcagcttttttaaaattaggaacttagcctatcgaacagggaacttagctctcaaataacccaatctaaaatttgctccaatggagatttgaactcaggaccttcgagtgctactcaggtcactgcaacatttcaaggagataaaagatgagagagaagagtaacggactacagatttatagccagctgtagcatggactacaagatgcatgtgtatatgatagatgggactgtgtattaattgtgtagtaatccctccgtcccataaaaaactaacctagtactggatgtgacacatatatcctagtactacgaatctggatatacatccgtccagatttattgtacgagaatatgtcacatctgattctagatttattttttatgggacagagaaagtatatgattataaataactattatatgaattgattacagatgatttagaaccaataattggctatacatctgataactgatctgggctcctcagctctcaccgtcgttggatcgttgcgacgttgtctactactacaaggctacaaaattcaatgatttcagaaccagcgtcccagctccgcagcttgggttggggttcatttaccggtttaccccccaccgctcctcgtctatgaaacgaaaagagaaaaaaaaaacacaaaatcccacgtcaaaaaaacaaaaaaaaacggcgagacgcaccgaaacacacgcagccacggcacgcccacgccacgccacgcgacggacaaaagatcacaagaagcgggggtacgcagccacgcacgcaccgaggtggggcccgcacgggccgcccctcacgcaggctgtcaggtgggcccccaccaccgggtggaccgccccacgaggcttacgccatcccagcgtttcccttcccccccccgcagcttggccgtgcctgactccccgaccccactcgacatgtgggccccacgtgtcatcgggatcgcgcgctgcgtgacttgtgcgcgtagcagagcgagcggatcaggatgcctgcgcggcttggctggctcttttgcggtttggcccctccggttatccacatatttgcgatatggcctccccaagttaaagttaggagtagtagtagtacactagtactgtggttggagtggaattatataatcatctcctgctcaattatttttttttgtgcacgtcgaccgatgtgatgcgagtatagtggcgtccctatgattagttagttggccttttcagcccctttttcctgttgatcctggatatttttccttctggcgccacgttaagcatttaggcccctgtgaaaaagattctgccatggagctgagttcactcctacagtcatgggttgaagtcaaaacctcacagggcggtgaaagtctttggcaccagccaccaactgccacgggtgtgcactcctttccaacttctttttcacaccaactatatttcatatcaaaggagttccattttttctagggttgataaatcatagcattatactatgggttccaatggatacatacatttattaactttgtgtgttttcttataagagcatgagtgtatctcgggattcgtttaaatcagaatcgtgcatttgtgcacgttggtggtcttttattaagaaacaaaatcgtgtttatggagttgtagcctcgataacgattttgaaaacttctatattatagtttaacatatgaggaaataaaatgctatcttgcataaccattcatggttaaatgcatgctacaattgtctattttacgtagctataggtgtaattttttttaaggtaagcatatgtgttgcgtcatgtaccagcctcttgtttctaatttatgcttatggagctgtatcggtggttacaatttttagactcttaaatattccctatgttcaaaatgatccgataagaaaacacattgccgtgttccataagcattacttaaatttcacaccaattagatctcacagtgaggaataaaccgttgctctagggttaatttatactaaatcacaccatctcagtaataaacgtatgcacacgttttggtgaaattgtgtgtttccttacaagagcttaagactatataatttctcatattatgtttaaatgatacacacacgtgtctatgtagggttgtgcatgttgacggtacttctatgaaggaaactatttcatgcatataaagctatcgcctctaatattttttggacactttgatattgcctatgttgtaagttatcgggcaaggaaataatttattatctcatacacagttaactgcatgctacaaatagttttttttctacatagctatagatgtaataagttatttttcaaaaaagaaataaagccagcaagtgcccgcactatactcggcatgctgtttcatatccatgcttatagagatatattcgtaattttaaacatttgaagtttagtaatatttgaaacgaccagataaacaaacaaattgccgtgctgcgcaagtatagatagttaaaatatacacaacagtaatttttacgaaaccaaatatataataaagtacatcttaaaaagaagcaaacgaagcaaatatattcaccaatcaccaccatgtgccacccttttactcccaacaaaactattactgtacttgaaacacacatgctgcagtaaaaaaaaaagaaaatctaacaacaaaacacccacaaaattcgcctcttccctacaactccacatcccaacggccgcacggaaaaaaacacgcgcaccgcaaagaagaacaaaaaccgacccacagagacgcacaagcacaacacacctccaccctcttttttttctattttttccgctttatttatttatttttttctttcgcttcctcatattatactcctcctcctcctcttccccccttctctctctcttcctccctatccgcctccttctccgccgcctcctccccgcaacgacgcggcgactacgacgacccgactcgccgcctcctcgccccccgccgccgcggcgcgcgtacggacgggcggcgggcccctcctcgccgggcgccggggtccgcaggcattcgccgccgccgccgtagtgtggcttcgtttgaggttggtgttctctctctctcgttgttttttatttttggtctcggtagggtttgggcggaattctgattgggcgttcgtttgcggtggaggttgcaggggctcgcgaattctagggtttttttttgggtgtgatcggaggtggggagaagcggcgaggacgcggggggaggggaggtgggggggcgtgcattggatggtctcgatccgtgcggctccccgctgacacgctgcttcgatggaggagcctgacggggaagcgcgtgggcgggaggatcatgctgcggttgggcggttgggaggagaggagggtgctgttggcggcggtggcctggctttgctcgctgttcctgagattggcggtgagctcggtgatggtgggaaggtctgcggtggtcaggagaggcgcctgcccacagaggaagatggagtccgagataatggaggtggctccgctgcagaattggtggaatctgctgtgaatgtttctaccccttttgaaggaaggggtcagattggtggtgagaaggagtctagtatgcaggaggggtctatgaacatggcgggagagaagcatggcagttatcatgtggaatctgctgaacccagcaatttgcagacgtgtcatgcgcccaatggcggggtatcgaataagacattatttgctcccttcagcgaagttttctccagtgataacagccatatgcgttacttgctggacaaagcgacagaggggagcatttgtgagcatggtgatttggcggacagtaaagatgatttgggtggcgcaacggacgtaaagacaaacacagaagatttacagatggtttgcacgaaaccacattgtgatagcgagggtttgtcggatttgcataatgacagtgagcgatggccacaagtggttgatggggtgggatttacgataaagggtaataatgagctgaaacaagttgatttgataccaaaaattgaagctgaagtctctaggtcggtggaggatgattcaatcccttctttttctggtggtattgatgattctttacgcaaggcaggttgtgcgtgtgaaactctcaatgatatggggatgtctcatatggccaatggtgatttgtggtgcaatgttttatatgcccctcttagtgaaggatgccagtccaaggatgctcgacacatagcagtcatggggaacaaggtgacacaggggagtcaatgcgggcagggtgatttggcgtgtgatggaattgttttgcgaggtggggtagatgtagagaaaagtctagatgatttacagatgtgttccaaggaaccacaatgtgataacaagggctttccatatttgacagaatttggtgtccagcagccatcatatggcatgaatgtcatatgttcgaagacagatcctaaccatcagctggaaaaggatgaattgttgacaaatactagaggagagttctctagttctatccatgaggattcagttccttcaatttctgtgagctctgttgattttacttttgatggcaatgctggtcagattggtaaaacatctgagcatagagcaatcatggagaaagtgtcgcatggttcacagcgaggaggtgtactttcctgtgagagtaggtctttaaaggagtctcatgcagatgagaatcagagttccacattggaggttaagacatgtgaagagggcttacagacaggtcaagtggaaccatgccacagcatcgtagctttgtcggattcagggaagtatggcaccgacatattaccacgtggtggtgacggtctgagatcgatgactggtgctaaccatgagctggtaaaggatgattttcatccaaaaagtgatgtagtggtctcctgtccagtggatgaggcatcgattccctctaactataatagccccattgatgttcttttatacaaagaggatggtttagttggtgagatatctgaaaatagaattggtgtggagaaattggctcatgatttgctcggagaagttatgctttcatttgacagcaggcctcagactgaggcttctggagatgagaatcaacacttctggatggatgttccaaagggttcaactgcatctgtttgtgaagtagaaaatacaggcactagaagatcttgtgatccctgtgctgaaatagagtttccactccaacaaagtcgtgaaaagcatgtgatctctgaatcccccccagagagagatctgactagttcgtcccataacctaccttgtgaaaatgaaccttgttatagtggcagggaaacacccgccttctgcctaggccatcaagattctgctggtcttggactggaatcttcagactgtttggtacaagagctcaatacgtgtacttccactgatgacaaagcttgctctgttgattttgttgagaatggtaatggttctcataaccaaaaggaagtgccggtgattttcttcaggcggaggaatccagtaagagctgcctcttcaagaaattctaattttgagaagtgtgaccagataaacaaatcaggtaatagtacacgcaaatctaagaaggttgacagtgtaagctcattacttaaaagcaccatgattaagttcccaaacaaaaccacaaagggaagaagtggcatcaataggccattgaactcttctgcttggggcagcctacaaaagctaatggatggtttcaatcagaactgtggtccttcaacttctcgttctcatcaaacttgtttgggaaaagaaatatcaaatagaggatctagcgagaaaaaacagctatctattcggaaaattcgaacttcaagatgttcaaaatataaaaacacatcactttctgatattggatatttagcaggtgaattgaatggccaaccgacctgttcagtgaggattgatactaatgtttcttctgatgcattgttcaattctccgaatggtgctcacaaagctgcacagtgtgttgaaggtaatcatactctaaaattaacatctagcctgactgacacacaacagtttggcttggagaatgttactcaagaaacatgccctgggtacatccatggagagtgtggtacttcaacttctgaacgttctctaaataatatagttgggttttcaccagactctgttttggatatagcttctgttacatgtgaaagcaacacttctgcaacccttgatgttatagtgcatgaaaacccatcttgtcctggtggattgattggaggtggtcttcgtgcatctgctttatctacttctcactgtgaaaatcatcatgcttcatcattgatggatttggagcagcaggtcaaaactgtgagggagaacgacatgggagaggaagatgtcattccatcacatgccatgatgtacaatgatattggtgaaggaaagcaaactttagcgaagtccaatacgatgaggaaaggtagaaatgtgggaaagcaggaatgccgaaagaaagatggaaagaagggaaaaaacataaacaaaaatagaagttccaccaaaatttcatctagtgaagcttcaaaactcgtgtccttttctaatgattcaccttcacttgatccatctgagttgctgcttcatacgagacctccaaagtttggttcttgttctaaggtcgtaacttctgccatacatgatgttggtatgcatggatatgacaatatgcgtccttttggaattgacaatgatgacgaagggagtgcatttgacaatgtgaaatcactaaggcgcaagaaaaaggatagtcatggaggaaagaagggtaaggtgcgggatccacatgggaagggcagaagcaagaagaaaaatatagctgataacacctacggtttgccggctcagttaactgacctgtcagaacctcgcatgaataaacagagtatatattttcatctttgacttctatcatttgatcctcctttactatcatttatcaagtagcttctgttggtgctaactatcttatttatacaggtgatcttattcctgctgctgaacttgtattcaagaactcttctgccgtatctgttgaattacctgcagttgttgcttgcaaaactgatggtgcatctgtaccaccagcacctgcttgggtttgttgtgatgattgcgaaaaatggcgctgcataccaactgaactggcagataaaatctcaaaagaaaatctcagatggtattgatttccatcctgccatccctatttgatcaattttcttggttgcaccagtcctctaacctaattgagtaatcatacgctgaaatctattactgcattgttccactggaaaataactcatttgaaatcctttttgtttggatttccttttgttttgctatgctagtccacaatcacctatgtgaaatagaaaagtttggtaaaatggaaaacatatttctttctaaaggaagaaagacttctgacactatatttagataatctgtagagtaaatcttacattttgcatttgtttgtgctctatcattttggcagttggctagcagccagccagttacccagaggaagaaaggtgcttcttgcatgttagatgtgcccatgttcaatatttcatattagtatttcctgtgcaaacagaggctgttcaattctacagtgtaactacagatatctattgcattccattccttaaaatattcgtatttcatgggcctttttcatttatgctcatactttccacgggattcatgtagactattaatgtatatatgtagaagcatatcgtttgacttgagaggtgatgtcatgggatttgtcttgcataatactttcataacagacagtttccatgtactatattgtaatgaaaaacatgggcaatattgcattggagactgaaaagtgaaaaatgacctgtgtttgtgaagtttgagagggcaaagattaaccttattaccaacatgtggctccgctacattgaaaatatatattttaattcttccatttggtttaatattattgatctttttgatgtagatgtcatttcagatgtgtttgcctactcattttgaattttttctttatctgttgaatggttaataaattacaactcattttcctttcttgtttatacaaaggacttgtaaggaaaacgaagataagacatttgccaattgctctataccacaagagaagacagatgatgagatcaatgcagagcttgggctttcagatgcttctgctgatgaagctaatggcgatggatcaaactcgaaaggtttgaatttttgactctatacattctggtcagaaaatgcaaaattttcttttgttgctctctatcatatctgatttgtgacaaactttttcatattgctgtgttgcagcttctggagaaccaaactttgcacttctcaggtcaaacttgtttctacatcgtaaccgcaggacacaatccattgatgaggtatgggttgatctactcactttttatttcttaattgacattcttttgttttctgtttgttaaatttacctagcattatttttttccgaccatattgctttttatgtgcaaggagcagttaagattcatatagagttttgtagtttatgtgtattgtactcagaacatggtattgcaataaatcttatggggggtgagcatgctacacattgttaggctcagtttgtggttgctgtgctgcgcgcacttgttttttaagttcccgtggaaatgaacttataattattgtagcttattctacaaatcgaatcacagttagataaaatatgttatccatctgtcatgttttcccaattttcatattttacattataatattatcgtttgccacatggatcaaaataaaggcagtttgctcaacaccaaaattcaaaagctctatctgaaaacgagattatcataaggcaccgcaataccaagatcaaaataaaggcagtttgctcaacaccaaaattcaaaagttctttctgaaaacgagattatcataaggcaccgcaataccaaacagagctttagtttctccacttacctcatagtttcacttcccatgccgcgtgtaggataagctggaaaaaactgttactgaagtgcctatgtaaaggcagacagttgtatcatagccactccaaatcaaggatggccatggttcacaagttttcagttacagcaaaaattcacagtcagtttcacttgcgcacatttccatttctcccttctgctacagcatgattagtggaaggtggaaactgttgttcaggacaagtaaaatgctccccatggcctctctctctctctctctctctctctctcatattatttatgtttctgctccctcaacctcttgaatttatattatctcctttttattttctatcagtactccctacagccctgaaaatcattttggacatatccagtcttcaaaatacaattttgaccactaatttctattgtgatatatttttaagtaattttcgagacaaatctacacacatgattatattttttcatgcctccaatctaattatttaaaaatttatcgatattcaattttttgaaagtttgacaacatgtccgaaagaacatgtttatgtgcctggatggagtacaggctaaactgtcttgaactgttgtagacaacttattatttctttgttcttggttcttttgggggttgaaattccagcagacaaacctgatatttctattttttttattcaataatgcaagagcatggtatgcaattgtaagccgcctcacgatgaccgaatgggttgtagagatggttgcttgaacaggatactcaacattgaatgcaccaaacgtacatgtccatgtggggagcactgttccaatcagcaggttagattctttcatatccttgttcttgtttccttactatgctgggtttgaacttataaagttcttggaacagttccaaaggcgcacctatgcaaaacttggtaagttccatactggtaaaaagggctatggattgcaattgaaggaagatgtatctgaaggacgattcctcattgaatatgttggagaggtagtgcttcatgctgcctatcgtcccccctcctctgtttattccgggtttgtggtggcgttatatttctgttagtgcaacttgcccatgggagcaatgttttatgttggcatgtcactaaataataccttgtatctgttgattgcactgagccatttgtgcatgcatgcatgtgttgccaacatgctctgttttctttttttttttttgcagggaaacatgctctgtttaaatgttgattatgttggtttcacattcgttgtaatgaataccttgttctgacatagccaggatacttatctcattcttttcacatggatattggtaaaaaagcaaaaagaatgaagagataatgattccattagtagcatccttcattccatgcatctattttatatagatatatttttaaacaactgtaactctgatattacttcgtcgtgtttccgacttatgtattaaaaatatactagtatatacaaattccatttttatccaaaactgtacaaccctctggtacagaaattctgtgtatttatgcaatctgctctctaactcaatttctcttctactattatgaatgacctcatgtctaatgagtttgttgatttgcttacttcattgttgtttcaggtccttgatataacggcttatgaatcccgccaaaggtattatgcctctaaaggccagaagcatttctatttcatggcacttaatggtggtgaggtatgtctttatttattcttaaccagtcatattgcatagatgtactccctcatttctaacttcacgtctttctcaatccctgccacttcttagatatgccttcgattagaaattatcagattagttcatttatatcatttcctataatatcaatagatgatacaaacaacccagtgtggtatctgtttttcttatgtcaaccttcatgatgctaacacttaaaattaaatcagttaatagttaataccacttttggcattttgctttgaactcttctaggtgatagatgcttgtactaaaggaaacttgggccggttcatcaatcatagctgcagtcctaattgccgtacagagaaggtaaaaccgttttatttgatctttatatttgaatagctgaccagatcccttgcctttgttacttaaaatatcctgataatgtccaatacaagtcatatgttatatttacaaataaataaataaataatgattggtgcataaaattgtgtaattagttatattcttattttgagtccattaaattactttttccttgtgagcagtggatggtcaatggtgaagtctgcattggaatatttgctatgaggaacatcaagaaggtaaggctagaaacttgaaatcatcaatgaacatgatgcaggtcctgagaaactgagagtttgctttatactagctaaatttaaataccaacttaaaatgttgtatatttttttgggaaaaacatattaatttgcaaaaaaaagtcatataaaatagcctagccacatgcaaaagaccccaattcaagtggttatctgatacactgactaccaccaccacctttcttattgtagagataatttgtgcaaatgaaacgtatccttcagtataacctatatctgtattatatgtgctgcacttaatggatatttatttcctcacagggtgaagaattgacgtttgattacaactatgttcgtgtatctggtgctgctcctcagaaatgcttttgcggtactgccaaatgccggggttacatcggtggtgacatatcaggtgctgatatgattactcaagatgatgctgaagcagggactttcgaacctatggctgttcaggaggatgctgaggaagtacttggtgcaaatggtttgtcctctcatggcacacatctagatattgtcgaccatgaagcttccactaaaacagaagattcaaatgattgcccatctgtgaacccaccagagttagaatctgagcaacaaacttcaggaaccttatttgacacaagtgagccagaaaattccttagaagcattgagcccacaggatgatgaagatgtcgtccgcacacctgtccatgtgtcccggacagttgagagtacgtcgcggcagtttccagaatatggtactcggtcatcagaaattttgcaaagggctccatgcacactggatggaccaaaggttccaagcacaacaaatggaattccgcctagttccgatttggggagccactgggtaccaggtttccacgctaataagaaaaccaatgtaaaacatcatttgattctgaatccatcatcagctcctattgacagtgagcacattttgggaggtaatactgttcttccaagtgtatctctctttctgtctagggttacatatgactgttaatgatcgctacctgacatgcacagttgaaggaagattgaacagcttgcttgatgtaaatggaggtattagcaaacgaaaagtatgtatcctcttgtcctttgcattatatatatacttcaattatagactaggactgaatatattttactgattttttggcatcaactcttaattaggatatgttgtcatatgctaaatggctaaaaatcaacccagtttttttatgaggcattctcttacggagtttgcaccgcgttggggattagggaaacttatatagtggtattccacatttcttgagcgcaaatgctaaaagacagtgtatgaaatatggattagtatttctcacatttattagtatcaatctcaagaacatagtgtatgaacgactttcgattgattgaacttctacctttattagacttctttaggtttaaattgtttcttggtcatcctttttggtacacggtgtggtttgaacttgaaaggctaggcaatatttgcatgtgttctgtgttgcatcaattgggcgtcaagcagtccaaatatctctccattctaccttttctgtcattggatattattctaactactgataatttttttttccaaaaggacgcaacaaatggatacttgaagcttctccttgtgactgcagcggaaggtgacaatgctgggggcacgtctaaaaggtttgattacctaataacatccagcaagttacatttgcccagtctaaatatgcttctgttatatctttcagtgtaagggatctttcgttaattcttgatgcacttctgaaaacaagatccaattctgtcctgttggatatcatcaataagaatggtacattttcttgcattctgcagctttttacgtgaaatacaatcatctagaattactgactaataaactatttgtactattttctgacaggactgcaaatgcttcacaatatattaaagcagaataaaagcgatttccataggatacctataataagaaagcttgtgaaggtttgcatttcttttttatgttatgtcttattacattagtttccaattaatatatcacattagagcaagtacatcccttaacaactgatctaggtgctacagtggacatatcaacccccacaagatccttgttatctactccctctgattcttttatgacttgtgcacaaaaatcaagaaaaaaaaactcaaaatgactattgtccttcatttatgctgcactggaaaagatgataatgtattttgtgagatggtggcatttatttggcaagggcaaacaagaaagaaaagatgtaaaaatgcatagaaattccaaagcaacttacatttaggaaagagttgagtaggctaaaacgtattgcatttggaattgtaggggtgttttttttccctagacctttggtaccattaattattatatgccacctattttttggtgctaacgttataatattttggagattttatcattaaacatttgtgaaatgtacgagggagagatttagcatgagccacttaccacgtttagcatgggcgaagcatttttgctgtaacacctaaacccatggcccatagcacaggtgctaactacatacccgtcctctagtaccttcttaacagatagggatggacatgcttttaatttgtaatgagtgcaatgcctgcaccactgttcttattttctgtataacaaaaaagagaataatatttctatcacagaattatatcattatgggaccctattttttccttatgagtaatctttcttcaggtacttgagtttctagcttccaagggcattctgacatctgaacatataaatggtggtcctcgatgtgctgggacagaaaggtttgattattcaaacttgttatttattcatttggtatttttcattcttaggtttcattatagttttctgtatatttgctttgtgtagcaacatattttttatgccaaaacatggtcttccgaggaaataaatgcaattcttgcttgttatttttgtatgtttgatatttcaagctttcaaattttcaaattttgctagtacatcttctgtatggccttttgtaatccatcaagcaaccacttgtgaaatgtgtttgtagcattgcaatttattatattacaagtcccatattaaagaatatttcctaatgctgccctgagtgaacagtatatttggaggtgacaattttgaattcaagacacttgttttatgtatatctaattgcagttgcaggtttaccattaattgtattactaagctttagccgtgcaaataacatgctatggacagtattttaatgctctaaatatagcttcttttgctgttgaagttttcattttgaagcatcaattctacaatttttccttaccttttattctctgaaattcgcattgcagcttcagggagtcgatgttgggcttgttaaggcataatgatatgcaggtaataaatatactaatcccaacgtgtatgatttttatcttgttttttaggtatttgtttgtgcattgactctttgtttagatagtatacaattcaggccatgaacatagtatagaaagattgcaagtttgcaaatgcaatcagcaaattaattattttgggagggaaatgtcactttaaaagaaagcaatacaacataattggtaatactagtgcatgtttctgaacttgtcatgcatatacatggtttgatattgattgtttctgtattgtaaatgcttagtttatccatggacataggacaagtctttttgcttagagcaaaaaatggaaccaaaatcaagttttctttattttcgttaatggataaccaatccaaatttccaatatagtttgaaaattcatatagtttttttgtttgtaaataagttagcaaatgtattagtgtgagtacttcgctgtaaacggattatgcattagcatcatcatgtttacttatgaacagctgtattctttgagccttcccggaaactgctggaacttagttaaatactccctccgtttcaggttataagacgttttgactttcggcaaagtcaaactgtttcaaattgaactaagtttatagacaaatatagtaatatttataatactaaattagtttcatcaaatcaataattgaatatattttcataataaatttgtcttggattggaaatgttactacttttttctacaaacttggttaaatttaaagcagtttgactttgaccaaagtcaaaaagtcttataacctgaaacggagggagtacaatttatattctctcttagctggcttgatatctgttggtctttaatataggttttgcaataagaatattgtttgttattacctgcatttataggcttagtgattctctgatgtgaggatatgacctgtttgattcatataatgattttaacaggttcaacagattgctcggaactttcgtgatagatggatccaatgggcccctcgaaatatttcaagaaatgagccaacagaatattcacgtgcatccatatctgcacacgatattcatgtcatttcaacagctggtggatcttttccaacttcagccaacactatggattggaaatccatcagaagaaaacgcaagagccgttgggattaccaaccagatgaccactataaaatgggtggcctgaaaattcagaaagtttgtcctgtacaaagtgagtttcggactggctcggtgggaaataagttgcatggtaattggggaacgaacagctcccacaatgatgttcctgtggtgggaagttcagccgatggtgcagatgatgaagcacctcctggatttgagtctcagcaggaaagtcggcctggacaagcttgtttagaatcgggggtttctccaggattatacttggagaggtatcaacataacttgactatttcatacgggattccaatcgcttttgttgagcattttggaaccccagaagttgaaggagggccatgtcgcaaaaactggaaagtcgcacctggtgtgcctttccagccctttccaccattgccgccctatccaagagggagtccttgtccttccactcagatgtctcagcatgaacacaacagtttgggacattgtggcagggctgcaaatagagacgggagaatacataggaattggagaaatggggcgagaacaaaatttccatacaatcatcaaggacggagatttcctaacaataatcaaagattttgaaagttgcctgctgcctccaacgtctcaggagcagggtgatccaggacctagaggcagggagtgacccaagtcctggtttttgaacctcaaatagtggtttatacattgtagttcctgtttatcagagccccagaggtgtatcagaattgcgtgcgcccgtaattctatttaataggagcagatgttactgtcagtttattagaggtagaaacatattctgcaaataggtcattgcctttgcggttcttttactaattaatttgcccattggctccctctgcgctatgtgtaatcccgataggaataattgatttgattcaaatcgttttacaggcaaaatggctaattggtttcaatctttctccatcatgtcaagaaagatacatgggatgtgaaaagttcctaaacagcctttttcatatctcttttcctttgtataattcacagtgttcccttctattcaatgcaatgcctggttagtccattgttttacttcaaaatgtatgtgaatgtgacttgccatgtcgacgacggagaaaacgaagacagtggagagaaatgaatgcatctatgggcaagttgttgagcaagtagagcggctctcaaacttattgacacatgttactagtattattgaatatactacaaagatagagagtgcagtacattggcatttaaagtaaacggtactcctactagcatatgaatttgtaagcaggagccggtataagtagccagattacagatcaggatcactgtttaatcattataattatgctgttccatggttgacaaataaacttttttcctagtcaaattttaccccctttgtttctaaatatttgacgccgttgatttttttaaatatgtttgatcgttcgtcttattttaaaaaatttaagtaattattattttttttcctatcatttgattcattattaaatatacttctatgtatatatatatatatatatatatatatatatatatatatatatatatatatatatatagttttacgtattttataaatttttttgaataagacgaaaggtcaaacatttgctaaaaagtcaacggtgtcaaatatttagaaacggaggaagtatcaagtttgatcaagttcatagaaaaatttagcaacacctaaaacatcaaattagttttattaaatctaacattgaatatattttgataatatgcttattttgtgttgaaaatatattttttttataaactttgtcaaacataaaaaaaaattctgacttggaactggaatgtggaagaaatggcgttggctctagggagaatgacacgagctgccaaccactcctgaatcccgatcaagtgatcatcaccgatcgatagatcgcaacatcaccagtgagtgtactcggtactgtagtactcgagtagtactactggcctggccttacacgccggatgcgtggccaataataaatcctctgtcccagcctgtttaattgactggacggcagtattaatagcagtacaagttcatcaagaaagctactactaaaatgtagtaagatcatgtttgaaaaataggtttggaatatgtttttccatcttaaaagggtaagtttcaatcttagccattcattcttctcttctcatttcatcatatcctttcgtccatttccatttttcaatcccaccctttctaatccattttctaaacacatgaaagttttgacgcagggggctcaccatgtacttgcagtcgctgttttacttccggggcagcgttattagtttctagaacgcataaatttaatgggaatttggcagaacttctaggatataaaggataactattctttctgagtgtttagctgatttttttccctttgaaattccattagttatttgcaatcaaatgaaaaatgtttcttgtgaaagattccctatttatttgtttttctgttacataaaagacatgtacacgtgcacaccaccatacacagtcacgagtacatccttaacatgttcgtctcgcggttttatacacagtcacgagtacatccttaacatgttcgtctcgcggtttccaagcgagttagtttttttattcgtgtcaaaaactccttccgacattcggtcaatcatctgatgtcatactaatttttttttcgcgaactaaacagaaccaactacattaccatcgcaccaccggtatttctcaacgcgcctctcatttattggtgttgcgcgtgccttcaactatacaaagttccaagcatcttaatcactaggacgggttacaatcaagcattaatctcttcttatatgatgcagatgcagtgatcatgcaggcgcagtgatgcaggcggcgtcgccgtcgcgcgtacatacgccgggccccgctgcactagctatcctctacaatttatggagctcgttccttcctcctacctagaaccatttccatttcttttagcatttttcaagtaattatcgaaaaatgagtttgattgatttgtacaccagtcactttcccatcttattttgcctcctctgccatcggtaactgatgaatgttgttgcagtcgtgattgaataggtgacatatcctttttcaacacaagctcgaattaatggacgaattaaacatattcatctaatttataaatagatttgttacatcatcaacataaagtgaacagtagtacccatgttcaagcatagaaaatatgcatgctaattgaacgcggggagatgttgtgtggtaagggtttagataaatttaaataatccacttcatcgcacacgcttcaaacatgacagtcccatcgtttcgtctactgctaattataagctgtagtatttttattgacaaaaagaatttgatgtgtttttagcaaattaataaccaatataaaaaataaagtaaaaaaaaaaatcaaaatcaactcctttgctattaagctgtatagcaaaggccaaaggatggagctatgggcttcgggaaaaaaaaagacgagacattgtcaaattatacatatattatgggagtacaatttaaaactaacaattaaactgctgcagaataaatctaaccatacaaataccccctacacatcatacacgggaagaaacatgcataagggcaacaactctaggcagccgtccaagctccaagctcgccaactcatagtagaattgcaatttgcaagtatgtcatgccataagtaaaaaaaaaataaaaaaaagtatttcatcccagcgatgattgacgatgccaaagtctagcagccatggtttgttccgtccatactccataaaatctctgggttcgtcactgacgctagatcttgtaggtattgaattataaaatctgttcttttaattaaggtatagctagtcagaaatattctctccgtttcatattttaagttgtttgattttttcttattagtcaaacttcttaaagtttaaagtttaatcaagtttacagtaaaacatagtaatatttgtaatacgaaacaaacattatatcaaaacatatttaatgctaaattaattaaactaatttgatattgtaaatattgctattttttaacttgttcaaatataaagaactttaacttaaaaaagtcaaacgacttataatataaaacgaaaatagtagcttagtgtgaataattggcgccattattttggcgggttgcccatcccatcagccgctgctagtctacggctacttaaaccagccgtatctacacacttgctcactctgctctcgttctcttctgtctgctactaccatgcattcgaccggcatggagatggaggtggaggtcgccggcgacgacgaggcggtcccggaggcgccggagcggtccgtcgtcctcatctccgccggcgccagccactccgtcgccctgctcagtaagccgcgcgagagagagatagcgcctaggcggtggttaattatctgacttgacggattgacatggcgtgtaggcggcggggtggtgtgctcgtgggggcgcggcgaggacgggcagctggggcacggcgacgcggaggaccggccggtgccgacggtgctgacggcggcgttcgacgacgcgccggggggcgtcgcctccgtcgtcatctgcggcgccgaccacaccaccgcctactccgacgaggagctgcagctctacagctggggatggtacgcacttgcgcttgatcgatcgatcatctcgccgccgccgccgtgaagcgaactgagaattcgatccgccgccgttgcaggggcgacttcgggaggctgggtcacggcaactccagcgacgtgttcaacccgcagcccatccaggcgctccagggcgtccggatcacccagatcgcctgcggcgacagccactgcctcgccgtcaccgtcgccggccatgtccacaggtacctctactctttcatgtattacgacaccctcccaaacccgctttctttttcttttgtttgatgtaatctcctagtcttaagactattgtacattgtttccctctcctttaatacaaatacaccttgctgagtttaaaatgaaaataactctttcatgtattacgacttgcccaagcgtttacccgaggatatcggactcaacgacggcagtgacaaacctatcataaaaattatcagtgatatctaattattgagtgatatacttaattaacatcgcgtaaattaaactaggattgaatcatctacccagggttctgtgatcttggtaagactttataggatcgctactgctctacagtaggtgagaccagagcgatgttatcccttgagcggagtcccctcgaacaggcgagcccaaataccattcttttttttgagtagcgaaatgtctagtcttttattaagagaggaaaactaccttttgagaaaagatagggtttctcggagtagaggaaaggtagtgatgttacgtagaaatcgctatttcttttcagcaactttattggattattaccgacgattatttagtacgcgtctcgaaaaatacgttttcttaataaactttcttctactgtattgtattccttagaccatttattttttgagctatttgctaattttgtttctaattatatttaatctatccctataatcaaagtgttcttgtgtgctggttgattgatttcagctggggacgcaatcaaaatggtcagcttggcctcggaaacaccgaggactccttgctcccacaaaagattcaagcttttgaggtatcaaaacgtcttcatctagctctgtttgttggaacagggtaaggcaaaatagaccaaaagaataagtgaaaatgatagcagcatccgcgggaaatatctttatgtactctactccctccattcacttctataaggcttattttgatttcgaaacggacaaactttgaagattttgacgagcgcattattaagcatacaaatatattttttagtgtttaaagttatacctatagattttgtatttcaaagagcttccacgtaatattggttttgttcctattaaaaaaatatattacgagaaattaatggtcagagtttagtcttgcagacttaattttatagtcaaaatacgccttatatctaaaaataaagggagggaccgagggagtacaaatgtattccacctgacgattttcttggccgaggctatgagtgccaataataacatccatgagccccccaaccatggaccacgaagtattcatgaactgatgccacaatttcgaaatcacgcaaaataattaagctataccatcagaagttgagcagtgagtggtcgcaatcaagccttcaatgtacttcacgatttgcgcatgagatcaccaaagaataaaataataataaaggaaacatttttgctttgtgacaatagcaacattgatgggcaaaattcttcaaatatctagaatgacacctctaaaattcagaaacagcacattgaggctgttaggaacaatacttgctctaattaacaacaagactgtgtggattcagggtgtccgtgtaaaaatgattgctgctggtgccgagcacaccgctgctgtaacagaagatggtgatctctacggttggggctggggtcggtatggcaacttgggactaggcgatcgcgatgaccgcttaatcccagaaaaagtttcttctgtgaatgtcagtaatcttactcttggttgtctctgactcttattgcagttatcatttatgttctacatcatcatttttttcatggagaaattttacggtactcaaagaaagtacaagtaggtgtgaaaaatttacactaaaaattttgatacctcgaagcatagcaactgaaagtatcaagtttacactagaagatgggatacattgcggtacattctcaaggatgataaaactacccttttcgttgattttccagggtcaaaagatggtgcttgtagcgtgcgggtggcgccataccatcaccgtgtcctcctccggtagcatctacacatatggatggagcaagtatggtcagctagggcatggtgattttgaggatcacctggttccacacaagttggaagcattgaaggatactactatatctcaagtataaatattatctaaaaaatatctcaagtataaatggatagccttttgctatgaattttgtaatatagcaatctgtcgaaattctatttgtgacactgtttttttcaataggaagaagctgtagagttgatctttttttttttgggtgatgaagatttcaggtgggtggaggcatacaatggcacttgcagcagatgggaaactctatggatggggatggaacaaggtgattggtgaattgcctactccccttgtttgattaattgctgatgggaacaaggcaccaatcttgctctgaacatgttcttatatgttgatgaatactaaatcttaaaacatttctgaagaatgacattcagtgttctttaagacacaatggaactagaagagccaagtgtcttgatctggaaaaagaaaaatctcacagcagcagatagcaaccgttttccctgttcctccagggcaccatactaccactacaacctccacttttaggtaccaagtgtttcaccaatccaccaaacaccactaccaaaccccacttgtcagcttgattttcggagtatgaatgatatgtgaccactctatagtaattcatatttcagtgaattgattagtatatgcagttcaattcaacatgtatgttcaatttggatgcctctattggcataaatatcttgaaaacgacatgcctctggcgaaataagagtttgtgaaaccacgtcgatactccgacaattttgagtctcgagtaaggtgtactacatgagaatcgtctgtacttgtgttctctgacatgtttatcctctgagcaccaatttaccaccattatccttgcattttatcatcacttatgctaatctttagttttttttttgtcatgtgtagtttggacaagtcggtgttggcgataatgaagatcactgctccccggtgcaggtcaattttccaaacgaacaggtaaacggtgttgtcttggagtacttgttctcacccttttgctctgttaacttttaattgcgtcatgtggttctaaacacaatggttatgatctttccgcaacgataaccgcaatgcttgtgatcatcaccaaggctatttcaccgctccatctgaagaaggattcctctcagttgacgttataagtttcgcattttcagtttcagtctcatttgtatcatatgccactcaactgcagaaagttgttcaagttgcttgtggatggaggcacactcttgccctgacagaagccaaaaatgttttctcatggggaaggggcaccagtggacagcttggccatggtgaaatagttgataggtaatttctcgcacccgaaggatttgcgcatttgcaaaaaaaaaaaatccaggtttaatgcgcggtaactgaatcaagaaaatatttctgttggtgaaggaacatacccaagatgatcgatgccttgagctcggatggatcagcttgcaagcagctggaatcatcaaaagccgtcccaatgtcaggtaaatatatgcaatgcatcacatcatgccttttttcagcttctactggcaggtctctctgctcatgcaattcttcagtcattcattcagagaacttacatcatataatcctgtttttcagctaaagtttgggtctcgccatcagagcgatatgccatcgtgccggatgagaaggtgagttcatgttttgctttcaaaaagaagaaaaataaattaaaaaaaaaacactctcacattgggctgaacattcttgttggataaaggaagtataacttccggcctctgcaccatgcacgcaaccgtatttcttgacaccacgatttgaaccctgttggatggagtcatatacctcacgactccaccgccacaccaatggactgaacattaattctttgcaatcaacaacattcagactgatggatatatcattctgcaatttcctgttcttaggctggaaaaggcatccctgctggcaatggaacagagactcatgtgccccaaggagatgtgaagaggatgcgcgtctgattcagcaacatatacgatccagtgctcttcttccacttgatatcctctattagttaaccttagaattagcatcatatatacatataataaccttggggcagcatttatcctctaccatcttatgacatatgctgcccagtctttaattagtgtgttgccttttcatttcttaaaataatcagtgatattattcacagtgaggttggtcatgtatgacagtatgagtaactatggactgtcataggtatcaccatgggaaaaaaatcagtcagtttattattctgcttggcattgcaaactaagctatgttatgtatgaattatctgtgatattttagcttaatttgtttggcatttcatcagtagctgtgatactcccacaaatttggttgcctgggctgacaaaaaccataatatttctttaaaaattggcatacctcctgccaaccaacttgttcagaaaccaaacatgagctttgctcatagaaagaacacaccaaagagtcacaaagctcactccaattagatgaaagagtcaaaactcacaattccgattggaacgcgggatttccgaagaaattttgttgggaaactgaacacagtataaactgtttaatccgtgtttccgtttcgaaaaatttctacagaattcctgcattccaacagggacatttagggctcatttgtaacatacaaacttctagagaaatttcatagcatttgaactaattaatgcaaaattcctgctttcccaaagaagtcctcgcactctttgcagctactgcagcatgcagcttatgaactattcaaaacaagacacacaaagtgaggaaactaatatatatatatggacaaagcacagtagcatatatggatgataatcgcattcatcacctggatttatctttccttgatgagaagattcttccaacaaatgagacgccattcttcttctgctgctgcttcttcttgctgttcatggcgttcttggtgttcttcttcctcgcattcccctgcctcctctctccgaggtggcgatcgtcgtcgaccatcttgatggccagcgcctccgacaggctgggcaggtactccaggctcgccgccatccactcctcggcgcggctctcgtcccaccggtcgctgcggaccctgccgccgccgccgccgaggtcgacgtcgatgtcgacgacggcgagctccttgcccttgccgcgggcggcgccggccgagaggatggcgaggccggtgctgagctgcgcggcgacgctggacacggccgtctccatgtgcgactgcctctgccgcagccgctccagctcgcccttcgcctcggccagctccgcctccagcttcctcaggcagcccagcaccgccggcggcgacggcctcccgccgccgccgccggcggactcgctgctcgcccggctggtggagctgaggcacctttcgccgaacacctcgacggcctccctgaccgactggaacggccgggaggtgtccaccacggcacggctcgccgccgccgcgatctccatcgatcgacaagatcaagaggacaatgccgatgccggcgaggaggaggctgaggtgatgggaaggaaagaatgcgacgatgtgagaggacagcaatggcgaactgaagtaggcatatcttgtccttgtcctgtctgtctttgcttctacttcagagttcagagttatcagaaactaaagtcaccagccaaaccagcaaccacaaccagaccaccgtgcagtgcaggacaggaggggagagtggcatgacagtggaatacaggcattgtgtcaaggccaaggaaaactaaccggtagaacaggagaagggtacttgccacccaaggcagcagacatcaagtggaggccgcagggcagattctggagaagtcggcacagctgatacctgcaaaaggcacaaattttaacaatctgaccctttgcaaaaactatttttacaaatgaaccgtcgccaaaacttatttcaaatctgactcttttgctcaacgccaaatcatttggcgctgaacttagacacctcaacgccacgtcagctggcgctgaatgccgtgccacggcggatgggagataagtcagcgtgccaacgtacattcagcgccatgctatttgccgctgaggtatctaagttcagcgccatacgatttggcgttgagcaaaagggtcagatttaaaataagttttggcgacggttcatttgtaaaaatagtttttgcaaagggtcaaattgtcaaaatttgtgtgcaaaaggtgcaaaaacaacatatacatacctacctagtcacatgcaagaatgaagttactaagtgagtactgacacaatcttgcaatgcctagtgtcacaaagaagggaaaaggatgcaatgcttcagctgttaggcacaaggcaatgaaaaaaataaatggctcattgattgaaggttgtgcagtgcacaaatggtcgttggaattgagtttcaagtcagattagcatgcctcagttacaaatgagatatctacagctaaggcacaaatgagataacgatggaacataagcttgaagtatttacaagtattccagacataagcttgaaatggaactgactgatagctctggatacatagcgaattatgtaaaaaggggggcacaggtgcagataccacaaaatctctggatcttgaaaaactgtgccaacatattttttactgatcagtaatccattctggaatttgaacataattaatccttgcaagaaaaatatgtcaaatatagttgttgtcgatgaaacagtgtacaggaggtgtattgaattatatactgctaagtcaaacagaatcgtgaacgtgatgccccaaaagatggctggaaatcaaaacaatgagaaggaaaaggaaaaaaaaacttgttacaaaaatggaaaataaaactcattacaatataggggagggtcaaattcccagcaaaaaatgcgaccaatatatcttcatatgaaacaaggtgctgactgtctgatgaaaaatgataacctatgaggcagctcagtgtccgtgtaaagtggttgttttgcttcaatggcgcgactgataaaaacgaggtctgttggtgaacacccgaccattggctctgacaaaatgtgtgatgccaatgcaaagaccagcccatagaagtgacaacactaaatggcgaacatcattcctggctgcagagatattgaagcagttaattagctgcacatatattcccattatatagtaaaaatagaatgtgactccaaaatcttctttgagaaagtacatatgtattcggatggttataacttgaaacaaatttattttactcaactgtgatacatgtccaatgccatcctcaattataagagcggttcaaatttcagtcatgctatcaaaaccaatgtaaataagccccaacgttctaaaccaccttacctctcatgttttgcaacatgcaaaagaagaaaaaatagtcagcacccagcagtattagcctatgcaactttactttttttcagttttacaagcgtagcatagcatcatatcagcagaaatccaagtaacttggatttgaattttatgactagctatcttgtttactgagtttgagtttttgagatataggaaagtgggatatattaggtgagttacgaccagaaatgggacttgtgttaggtatccatgtttgggcttggaagtgtgatcctaaacaaggatcagtgaccatcaataaattaaggaagaaatatgtatatccttgtcacttgtcctcctccattcctaactgcctaagtgcatctctctttgtacttgctttttttctgttacttcttgattaccagcaatgtcactccttgtcaggagtcaggacctggacaaagtctcccatctttcgtgcacaactatgccttgcaaatcgcactgggcatgacatcagagcgaagaaaaggttgcatactaaaaaactggcaacaatatatagcaaaattattttgcagatgggtgaacctaaaggaaccaagaattgtaagagagagttctttgtgtaatgtaatatgcacagagagcagaggaaatgctgcctgacacggtgcaaataaacctaagaaaaatatctgttaagaaaacaattgttaaatatactccactgtgtctgcttcaacagtcacagaaatcttaccttgtcttagtgacatcatcatgaacataagagctcccataaccaatgcaaaagcaaggcggaaggactgcaaaataagaattgtgcaattaagagctttatcccattggagaaagatacaaaatacagtccataactgatccaacagtttctcatacatacagaccatagagtaagttcctacgcacatgtgcctagtcgtaagtgtttgacagggtaacaaagaaggctttcccagtagcaattcatgtgtcagtataaaagagcaattatacactacagcaaaaatgtacccaccgcataattctctagaagtcctgctttgcttggacctgccatgtcgcggctaacagatataatgtaatgtccttgaagtagatccatggcatcctataaaaaacaacagaaaaataataaggcaatgctctagcttggtttaaatttttctagggctggtgaaatggcaaatgagtgaccacgtaaaacattccaatgcactaccaatatccaaaagcaatgcttactattgcttgaggatgtttgcatgactaatggtctatcacgattaagtgagaaattcacaagaaaataagctggcatattagcggtgaatggggttcattgttttggtcattctgatttattgattttcatgcaaagtcagtcatttacctgtttagtgccatctgcaaagttattcaagtagtatctagcaagtgaattccacagatcattcagaattccctgggtacttctcttcccatacctaataaaacaaaaacaattgttaaatatgggaacaaacaaacaagtaataaattatgctgccgcattttatttgtcaatatcagaatatgaaagaaaaacgagcataaatttagcagcacaaacttatgagtgccccaaaagagcatgtatactacttagtaatgttagcccgtcatgggatctggaactatcttaggccttttttcactgatggttattagcatgctggaaatcagttacaacccatagggtatttggttgcccacaagtatggagacatttcagcaagaatagtaaaaggacatcaacttcatgatagcccattgaaactcttaaaacttccaagttccacacaaaacataagtggctcagatgtgaacagactcaaggtgataacaatcactatgattttccttttctgatgtaagctggaagtagttctttctcttgataacaaagaaggaacttccagtaatactgttcaccatgaacttccagtaacactgttccagtaaatgtgctgcactttggaaatgaagaaaaggcagtttttctatttaggaattaccgaacaaaatcgcccttcaatgccggagttccagagtactgagtgcttattgaatctccatggttggcccatactgaacaagagtattttgcatcaagaagaagcataggagatacaaacaagcatgaggaatacaaacaagaagaaccagggttagtgaacatgaacaactcacaaactttgtattttgcatcaaaagctggatggttgcttatcgtatcattaacaccgagaacccctattcgctgaagttggttttctagtatctttcctccaatcatgctctgtttagtcatcatattgataatcagaattctggtaaagtgaaaactccacggaagagggggaaataagacataaataaacgatggataagtattaagtattatactttgaagttaacctagtctacttgactgcaattagatacttaggagtaactgaagtggcttttccctttgaggcatgtgatcttactacatcagtcaataggttctgttctagaatacatcaaccagcaaatcaaagtaactcaagccagtccttaagggtacatcaatatatattaagtccaacagtttggatttgatttagataaatccaatgagacaacccactgcaaaatgacaagttaactcaggttgtagatctatctggcagcacatctaggtttgtaatagtctaaaaaaagagcaatgccacttatttaaaaaaacattgtcttccacacagatctcaaaagaaggaagagaaactatcaagaattagctactacagtgcaacatggtaggtaaattatccagtaaccataagtgttcacaatatctacaattaaatttgacgtgcaacaaaaactatacttgacagtatatacctgagttacattggtgcgatctaagcaatcgacacaatttgtcctgatagtgccagtctgctcctcaattttttcacctttaccattcaaaaggaaatacctaacccataacattattagcaagatcaagaaggagaaaatatatccaccatgttccatagtaatgaaaatgctctgtccaaaggcataagagagttgggatagtacagagatgtactgaaaatctcagacctggaactttttcccctttctttctgttaatagagcaaaagagaggaggggagcggatgctaaaacacctaaacaaggacttaaaaacagtatgactaacacaagtgactattgctcttccctttgcctactatgccagagaattcagtgcacgaaaataatctacatactgctggagtatttgtgtttttaatgtataggtattactgcacagtgattgagtaatcaaccaatattcagatgactgaaactcagaagtagtaacagaaccaattgtttgctaaataaagtaacatgatgcaagtgtctgctttagaagtttcatatgccaaaccaagagtcaagaactagtgcaccaaaaattgactctgcattcatttgaaagcatgtgtagtcacgtggtaaatagcctaatgattttggggggttgcttagcgaatgaaacccaataacagaaaaaaaaaagacagcaaacaaatgcagggaaaaagcaatggattaagtaacaccaaaatacatgtcatgggcactgaggccagaaaatgataaacagatcaaatggagcactctataatgtatctgccaaaaatatacctatgtttcttgagataatcttcaatttgattgtagagctgagaaaggcgctcaaagtgaatatgaccacagattcgatggaagtcaaaatgcacatatctgcaagtgcacgcattgatagatatgttaactacagtaatatatgttggagaacactgcatttgggcaaaagaaattgctaccttatgtcttcactgagaataggttcaatagattttgcatatctgtcatggaggcgaccttcaccaccgtgctgtatataggaattggaattaaaattaaaggatgaacagccatgttgttaaaaggataaagcaacaaactagaatatcagaataatcggcatcctctaacttaaacaaaaaatataacaaaatcatattgcactttttagataaaatcatgaaatgtctatgcataaaatcaaggtaaaagtaatagcttggttctattcccaggaacatagtaatagtatgcccaatcaacagaatagcatggaactgggcagaaccaatattgaagatcaatcctaaaataaacaagaatctgattttgtatgatagacaccttgggtagtggcaaaatcaaatgtggtgacattttagcaagtaaatatacttagttctaaaaaaatacgaaagacaaggtgattccaaagtttaaaggcacgatacttactgtattgacaagatcaacagccaatacagctccatatttcttctgtaaatcatgaaagtgctgctcaagtatgcgtggctgaagaaagaagccaaagacaaattaaaacaaaaggaaaaagtttaggttgcattgcagagaaacaactaaccatgctgggttagtataacacagaaagccattgaaaatgtatagtttagtaattgtgacatagtcaacaaaaaacaaggaataaattgagtgagctcaccgcctcctcttgtctaacaatgtcaaagctaggtttatatgtcaaatcaacaatctgcacccacaagaatggtatggaccctcgaacctaaaagcacattaatttgtcaaggtactagaatgtggtaaaaataaaatagtaataacctactgatgaaattgcaactcacaaattgatagaaaggcagattggttggttttaaactatcctaagaaacttacttgtacataggatgctgtgaacccttttgattccattatctgctctgattcaacaaagttggcagcataaccctctgggtcagctccacgtctccacattcgtgtaccttttagttaaaaaaaaactcatcaactgtaattaaatctactcatatgccagtgagtttctcaaaaataaggagccaggatgtaataaaaattagaaaaaataatcaaatacatataaaaaaatattttcaagtgacaataagcagaagagaacatgtgaacttattctgatcactgatgattctcacctatcctccgtgtgcacctacgtgcaatcagggtcacatttaccttctccgatccaacttctgcatggatattctgaaagcctgatattcagttaagtgtctgcgacttatattgacatatgaccctagggaaggtgactcaagttcaaataataatatattattatattgcatttctgacagtgaccaaattgaaatgtcatatgacaaacaaaggatactgccttgaatgactggcaacaagtactggtccagctgttaaggaagaaagaaacaatcaatacattttgcaagtatcagttatttaattcttcaaaactatgaaatcagtaagcttcaaatttaattcttgccttgttctcaattagaggttccagcaagtaactgttccatagaaatcttggttctgcctgtaaagaatgtaattatttcacctgtgcaatatagatttgaaaaggcacaggaattttttgtttacatgtttaatctgttgtgcttttaggcatttagcacgagcaacttttgacatagcagcactatgttgttgctttaagaagctactgtatacaagttcaaggcatagcttataaatttaaaattcaaaataaggaattgccccagtcttgaaagtaaaatacatatggtatatgattaaaaaaggagatatttacagaattattgtcacatatgacccattttgagcctttgtggaaaaggacagtgcaagatggatgtttcacagtataaaatgttaattcaacagtacttaactccccagtggaaaaaaagtactgtagtatgttactctgtaaaaatttagcactctttacatttttcatgcttaactactgaaagttttaacttaagccacagcatgctactttttggggacaagacaggtctttaaaacaaatgctattaaagctccaatgttcctagatgggatctatgttttcctagatggcaagataattgtgcagcaattactggactatagaagcagcagaagcaaaaataaaattccaggcgctcaaatggcaaacagtgttatacaaatcggctctaggtgccaggtagccacctgaattaggcattagatcattactagtggaaggtttcagttttatgtttccaagaatgccaaataagcaacaaaacatttagggtgcgtttggacaggaatcctaattcgcgcgtacacgcgacttctccaagtcgcgagcgtgccacatggcgggtcctcctacgaccaagcctgcgtgcttcttttttctttttttttccttttttttcggtaggcgcaacagccgtgtttctttctttcttttttttttggccgttaactaccacacgcgtctaagagtaggagtcaatatttgaaaactttcaagtcaagatttaaaaacttttaactcagatttgaaaactttcaactcggatttaaaaactttcaacttggatttgaaaatgttcaactcggatttgaaaactttcaactcggacttgaaaactttcaactaaagatttgaaactttcaattcaaatttaaaaaattcaagtcaagatttgaaaacttaactgaggtttgaaaacttttagctcaaatttaaaagctttcacctcaaaattcaaaatatttgacaaaatttgaaaactttcatctcaaaattcaaaacattaaacttaaattttagaaacttttcaactcaaattcaaaactctcaactgatattgaaggtgaaagattgaatttataaaatatcacaaaaaaatcatgcgcgagtgtggaaaagaaagaagcgattaaaaaaatctagaaaaaaagaagcggtttaaaaaaggaaacaaaaaagtgacgttaaaataggagatctagaaaaaaaaaagaaacgtgtagggacgcagctggcgcacgcgccggctcctttccctggcgcgcacgcgcgcactagcatcccccgtgtttggatccttggctaaagattttctagcctagcctagccaggcttggtgtttggtaccgatgaaatatcctagctttgagggacaagctagctttgagggacaagctagccttgatgggcaagaaaaaccttgctcagccatgagaaccgaattggctctctctcatcggcaagaagtgcatacgtgaggggaaaaactgatagccgtttctcaacgtggggtaaaagcaaggaaaccaaatatggtgcttgggcaagagcagcaatagctgaaatgagctagttgaaatgagcatagctaaaatgagctagtttgcccattcgagctatagctaaacttacctgagcatccaaacatacccttagttgatggtggaaacagcccatacgatgcatttttttcattttgttgtttcctaggcaataaatgcaagagacaacagatattggacatagtgtacacatagtttcatcttgatgaaacccattccacctctctcttaggccctgtttgggggagcttgtcccagctgcagcttttcctaaaagctgccccaaacagtccacagcttctgagaatctgtagttacagattctgaaaaatgagctaagaagccagaagctggagaagctgggtttcagagcttttccagattcgcagaagctggctaccaaacagctgcttctcagaatctaaagctcccccaaacaggcccttaatctcttcatcaattccttgccacatcataaaaaatattgacatggcactctatttagtgagaatgaaactcccattgggagtggccttgggcggctaaccatccatgtgggctcctttagctgctaatttaatgtcctactgtctaacatttatatgtaatatgctggctaattgcttggatttcacaagtcatgttggacctagatgctagctaagtgacgcctagggcgcgccctgctgaccctctagtgcctagcgccttcttgaaccatgatggcaaaacacataaatacaagtggccaatatgcaacctcttctgacttctttgttaattaatttccctttttcataaatgtcaaaataatcaaccattacaaattgtgtctgggaattggaattaaaaatcagactggtttagtttatgtccatatttctacatcagatgtgtaaactgatagctaaagatgaagtgaacaagaagtagcttttggcaccacagcagtaaagtataggcagcaaaagatcagggattacaagaacaatggagaaagctcagaccctatgggtataaacaaactctagaactaaaaggttccaaatggtgaaggcagcaaacctgtctccaaagcggaagtgatttgaactcatcaccaagattatgtagcctctgcaaactgcaatagaaggaaacatagataagcatgctgttgcaataagccaaaaacagaagaagagaattaaatgaaagatgatagcacaggtggactgtaaaaataaatagagaatgccatctactaaaatagaagaaccccatgcatagaattgcatactatgctggaaatcctcaatgcaagtatgcaacaagaggttgtaagctttgactataagacactagaatgtgactatgtttgacaagaaggatactcacgtaagtgttaagttgatatcatatgagaagtacaggcctatagtcttctctgcagcatgcaggagttctgaaaattctgtttccattttactctgccaacagcttactcaaatcactaattgaaaaatagatggaagctatataaaactgtgaaggcataagtattgcttgacctgattgccagaagtgctacgtgagttactgcaggggagaacttttagtcctgtcactttaaaaattgcatgtcccaagtaggatcccacacaatcacggcctgttatcactaaaaaatatgatccaactgaaagcttgagaactcctatcacaccatacactgtttgacattttggttttgtagaagagtcacgtggtggcaactcttcaactagattcattgaaccatcagaacggttagctgacagatacaagtcagcaagaccatcaatcggctcaaatacatagcggtctgggaactcccatagtctcagtcttgtgtgaagtttagaggatggacttgagtcatttgccccacccatggaggaatgccctgatataaataataatagaattagcaaactgaagtgtaatgaaaaatcaaagggccagaaactaataggttaatggctttgatctatataatatgtattatggatagtgtcaagatactgggatgacaagggataaacatattagccacacccacagcttatatgtccctagacattagaaataaccagagatagataacaaacaatttttatggaaagaaattatagaaataagctccaggctaacatccttcatggaaataaaaaatatataatgtgaaccttcagccctcatgactgcgagatggctacggccgcattggtggctaaacaagctgcgcgtaatggtgcagggcaaaagatcgttgggggcaccggtggaaacatgattctgcgggaaacttaaagagggagatctcctgcagccctgcatccagccaccgaaacgaggctcctcgcgaggcggaagcgcggatcgaaggcggcctgtagatggaggagcagcacaggcagccatcggaccccctaagctgcggctagcatcagagcggagatctcgggggccatgagggatccgaatgcctggatactgctcctataggttgacgatttgggagaaagagagatcagatgaggatcgcgcaagctgggaatcgagctaactgacaaatcgcagaaattacagtagccagaaacagtattacttaaaaggggacgcattacggcaaaaaatttgcgaaaattcagcttccttttgctcccaaacaaaaaagggtaggcacagctcgctcactgccacgggaaacgaaaaggaaaagcgggcggcggcggcggtggcttcgaaaaaacccgacgcgcgcgcgcgcaccgaaatcggcggccaatcacgaactcgcggcgtccgatccatatctaaggacgagagaccgtgtgtggctcgttccgggaggagatcgagggggagggagtcggcttcgcggcgcaccttgggagtcggaaacgaggcggcgagcagctgcggcggcggcagccgatcggggcggggaagaggcgcggcggtggaacggcgggaggaggaggaggaggcggcgccggcgccggcgggtgcgaggcggaggcgatctctcgtcgatggggcgagtgcgcagcacgacgagacgactagtagttgttcgctttgttcggcggccgtttccgtgtgtagctgtgtatgccagccagccaagggggatagagggagggagctgtatgggccggatgggctcggcccacttgaagcagcccatcattgatcagggaactgggggaaatttgcatcctcaagttccaatcgcatcccttaaccgcaaaaccgcgtacgaggcatccctagtcctaagggcatcagcaatgtttgctatccacatcggtattagcgtgggcccagatgacaggcggtaatagagggagacgtgctccacattgcttatatctgtgagttggcagtaaggtggggtccatggggtaataaaaatcgtagcaaggacagagcatgcatgcaacggttgggagaagcaatgcttttgctgtcagaaaacactgtgtacatgcatattctatttccttgcttccggcagtaggggtatgacccggttgtagttatgtactagccccacaatgcttaataccaggtagtaagagtgtatttattgcttactacccggtttgcgagcacattgctgatgccctagtattgaaaccggttttgggtaatgtgaggtctatttggcacccacatgtaaaaaaaaaaatccttccccactcttccctcttctctctcccactcttctcgtggtattgaacggtttgtgtgagtttaggggtatacatttctggtttcgtggttaagggaaaaaaaatctcgttgttaagttgagagacctccagtgaacttattccttttgcaaacaaaaagcgtgctgttttggagtcacgcaggcccaagaggcccatgacaggctcacatagaggcaaagccagcgctatagctcaactcgcaacgcaaacaaaaaacggatttgctaaaatgatgtcgccatattttatggctgattacagtcgaatttctgaccgtcagatgttgttcagtccactcaggtccttagtatttctcggctgtcattacacaattaattaaaacttaacatgcttcattagtttaagcttttgatggttctactcatatgtatctgcatagtatataaatatatgtaatctacaatgcaaaatatagacgttgtcttgcacttacattgtaattacattaaacttacatatgtaatttagaaacttacatatgtaattttgaaacttacattgtaagtacactaaaattacatatgtaatttagggacttacaatgtaaatacatggtgactattttttggtgaaaaatatagcgccataagtatagctactcccaaaaaaaatgcacaataagtgctagattgtagaggaggtatacgtaaagatatgtgctaaccttgttactattgctcgaaagaaaataagtggtgacaattactcactccgtttcacaatgtaagtcattctagcattttttacattaatattgatgttaataaatctaaacatatatcgatctagattcattaacatcaatatgaatgtagaaaatggtggaatgacttacattgtgaaacggaggaagtaatttttactgaagcaacttgttgtctagtggggtgtaggggccataatccctgcctctgtcacgcccggaatttctatccaaaattccaaacgcttacatgtgtgtgaaccctcgtccaggaatcagccgaggcacacaataacaaattgataatagagtacaattattactctaattaataagcgaataaaatgtcattacagaggtagatagttcctctcaatcaataaatatctaagcagcggaaaataagataaacggcgcagacggctccactccacaggcagcttgaccaaggctacacctaatcctccacaccatcagcttcactgtagaactcttcctctgatgaatgattgcaaggtgagtatatgacatactcagcaagtcacgcagcaaatatgcaagtgcacaaggataccaaagaatggcatagtatagggctcatttgcaaaagcagcgtttagcaaacatttaagagaagaaaaacagtggagtaaataattaatcaatattaatccaacactatacaacatactctgttgcataggcccaaccattctgaacaaccatcccggctgaacagttctatctccaaactaggaatgtaccattccaaaccaggagctaatcaaattattaccaattaaagcaccttttattatggtgagaagtgtgagactaatcacgaaagacattgttagacccgcccataaccgcgggcacggctattcgaatagttttactctgatcagaggtgtaccactgtacccacaagacacaaccccacatcatgtcaccatgtgcctcaacaccaccacggtacctcggaaaggagttgtgacaataccccttgcataacacaatccactacagcgcacctttcctggatcataatcacccccttataaacaaggtatggactccccagcgacccccgtgggcttatctccgccacttctcagtctggtgccccgcaatgaaccatgctatataaaagataaagccgttgcccatgctggcttgtggttggcacggttaatgtttcacaaccgaaactcgtgaaccggtccttaattgtcatgagcacgactctcaaaaccatgtgctcacaacccaccattatcaggttttagttggcacattaattaattaaccaatcacgattgaccatcgtgaattatcattaagccatcatgaaataatagtgagtcataagttatcccaataatgtgctaatgtttctaagcagggctaagcaattatatctaatacatctagttgaaccaacatatagagctcaactagtcaaattataataacccaaggtatcaaggaataaagtaatcaagaacaaaagggctataacaaagaataggttaattccacccaatgacattcgaaaataaatgcaatagttgaatagaaacaatagctttaaataggatcaacatgctcaaagggttgtttggaatctgtgtgacttgccttgctggccttggaactcttcaaattcttctgctgcgaaaacggactctccggaaatgtcggaatctaaacagaaaagagcaaaaacaccaaaacagcacataaacaagcatgaacagtacatgtggatatttttaacatgtagatctcaattttagaaaaatttagagacttggaccaactaaatccgagctaagatgaattagttatgaatttttgaagattaaatcggattaaaacacttatatggattttaattgaattatgacgcaataatgaattatttttgaaaagaaaaaggggatttattgcgtcagcggctagggtttcggtggaccgggcgcacgggcgacggttcacgtgaacggacggccgagatcaatccatccaaaacggacggtcgagatcgatcgggtccacggcggctcacgggagagggcgacgatgacgtcagcgatgacgtcaccaccggcggcggcggctcggcggcttgggcgcgcatgctcgccggcgaacgacggcacggcggcgcgaacggaaggcaccaacgggtagagcgcgacgcggcgaactcaccggtgaccaaaggagcggcggaagaccaacggacggcgacggcgacgaggttgaagcggcggcggtcttcgggtcgacggtgacggcggtgctccgacgatcttcggcgacggcgaagcggcagacaaggacggcggcgacttggcgaccatgacggcggtcttcccgagcaacggcgatgaccggaacggcggcagcgcacggctggagcgacggcggcaacgacggcgctaggtcacacggcgctagagcactacggacgacgagaggcgaaggcgagggtggcggcgggtagaggagagctcggggaaccttttaaaggggctcggaggcggcgacgaaggcccacggcggccggcgacgagaaggaaacttcggggttcgaaggaaagaggccgatccgaatcgaactcgattccacgaacttccaaaacgaattagccgatgtttccaaaggggaaaaggtagaggagatccctaggatcatttcccctctatcaattcggccggagaaggaaaggagcggccggatttggaaggaaacggcggcggcgctcggttagggtttcgggcggcggccgacgcgaggaagacgaagactgacagacgggccccacctgtcagcaggcggacgcgcgcgcgcgcggcggcggactgggccggcttgggccgaggagagagagaagaggtttgggccgactttcggcccaaagccaaaagagactttttaaaacctttttcaatttaaattattcatgaaatgcaattccatttattaaaaatacttccttagctcaaataaatcccagaaaaatctaggaattatagaattaagcaaagtatttaatgaaattttatctggccccattttatattggaatttattaattaaaattagatcttctcttctaggcttttaaaatcatttctaaaaattccaattaaacaacaatttatatattttgaatttttcaggatgtgacagcctccaccgcgcacattgactacacgcggatacgatgaacggataaggctgcgttctaaagtgcatagttcaatgggcttggatgggctactggagtcgtcactctagactaatgttgtcttgggctcaatgcttcctgtagatgtaggtgtgggagtttgacgccgttgttgatgtgaaccttacggcagccgtccgtcaccggtcttctccttcctccctatgttgtgaagtcgacgcaaggggcagctcaccccattgtccagcagttcaccccattccctttcccgtaagagtgcacagcacggaccggcagtcgtcgaggcggaggaggagagcatcggcgtgccgtgcggagcagcggccgctgctccttgccataggtgccgtacagccgatcgacatcgacaactcgtgagcaggctcttggagaccgcatcgaggggaatcggataccgcatcgagtgcaaaggggcgcggcgtgcgcagtaggcggcagcgattccagccgcgtccgggctacgcggcattgattcctgctgcggtcatgcagccttgaaggttgttttgatcaatcgctgcgtcgatctcgtggaagacagtctgcatcgacgaggcattgggcatcgaggcatcgattcctgctgcgctcgtgaagccttgcaggatgatttgatcaatcgctgcatcgatctcatgcaatacagtgggtctgcatcgacgacggccacattcatttcgaaaatgcgccattgaagagccgaggcctcctattttagagacccctcggtcgcaaatggctgcaagaggaaccaagaggaaatttgaggccgctgaacctctgatctgctcctccccttcttcggcgtcgcccatcgacgtcggtaagctgggagaggagtccgtggagctggaattgagcgaagattcgaccaaatcttacctcttcgacgctgcatccggagccactgcacaagacgatgtggagcttgtcactcgtgcactctcctccgtagctgcgaagtcccccgaagccgtccggcagttcatccgccgcctcaccccggagaaggttgcacgctcgctggactaggacctcctcgaatcggacaaactaagaaaggtaataccttgctctatttgtgtttcctcatgattattttggtatgctcaatttgtgtgcttagatggccggcggaggtcacactcactggactgaggacgaactccatgcgttcttggaaagctgcatggaggaaatagaagctcgcaacatcacttcgtcatgccccaagactcaggggtatgccaacttgcaggccaagatgctgtccaaggcagggaagcatgtcagcaagcagcaagtgaagaacttctggggtgcttgtcgccgccgtttccagacctggacatggttggaatcgatggctacagggctgggaacaaacccgtacaccggcagcattgacgcctccccagagtggtgggaagcaatggaaggggttagtcctccctttctcttcctttttgctttaccgaaaccatgtgttcagacttagtttcagaacaaatagtgctgcaaatgttaacttagtttgacatgtaaatatttagatcttagtattacatgcacatggcaacttagttttgaaacttgctttgagatgcaaatgttcagattttagcattagatgcacatgccaacttagttttagatgcaaatgttcaaacctagtattatgtacatggcaacttagttttgcaagttacatagtcacatagatattttaaatagctgtattcaatatttcagatgtaagcttgtcaatttgttaagttagcaagtgtgctgtacaaatgtgcctttttccaatgagaagtacacatggagattgcaatgataagtacacaaacatgtcagttgtcaagtgtattacatccatttaattggtaacctcacaatgtgttagaatcattgcaaaagggattatttcttatttaccattttttagctgggtcatcatgttgataagtacaaatggtgatgtggacatcactacctcggatacatacaacaatcctccaacggtcattcaaaaaccgatatcaagagctcgtgcgcgacaattaaatttagaggtgagctcgttcctatgttcttctttgtatgaattcaagaatagattgctaccgaatgattatattgtgattagtaacaatggaggggacaaggagacacttggagaaagacttagagccatggaggattatcgaggtgttcacagtgaaatttggtaagcctggagtagtcatcggcttagagtcagcatcggcttcgaagtcctgagattagccgatgagagttgtcaagtcgtcagttgtcggattcttgctatattcggttaaggaaattgatctactaaaggaagcttatccagaagagaccgagttcaaagagaatgcggcatgacaagttatctattaattaggaatagtttgttagttttcttttatctttaggaaagtgtgtttagtgtcctataaggactttatcttttccttttatctttaggaaagtttctttcttgtccgacaaggacttgtatcaacccataggtataaatatgtacactcggggtctatgtaatctatcttcacgatcaatacaattcggcgcatcgccaccttttaccttttctactttattttatcgtccgaagggacttggcacctgatgcggggctgcatcggtgttcgatctctggctaaggggtaagtccaatgttccgtcggcccaggtaattatatcgtttacgtcggtgtcgttcaaggctgcatcagtacattcgacctcttggattgctctggtttggatgatatatttgcctacctatttatcatatgtctttgttaatctagtcttagcatatcaatttagctctatcggctgcttctcgttttagggtttctgccggtatcggttaaatcacattgctagattagattagcttagacatctaccaccctgaaaactcagtcaacggcttgattgtctagatattatgtttcttttcatacttagtgctgcatcagttaagtttgatctactaagtcgtgcttagaaccataatctctagcctgcttcttgattgccaataagggtttcatcggggttttagccggtgagttatctggacgttgcatcggctcataaggattgcatatacatataagttggatttagccgatgacaacaaaggtttcactgtttaatctaatcttgtggatttcatgacatcggacctccagccgatgtgtgctttaaccttcggatcgatacttatttatcatatcattgctagccgattggtttatactggattatattgttattttattatatcatcatcggcagattgccaatatatcattatccacattggacatatagccaattgcttaatccctatcgctatcggctggtatcggcatcggctattatcggctatcggctggaactactccatcggcttgtcagccgatcggctattttgatctactatttgcatatcttgtcagttgcaggatcaaactaactggcacgctcgcatctcatcaatctttggacatgcacaggagttaagcagatctcccaggccggtgtgttcgattttttcgtcaacacgaggacgtccaagtcaaggtggaggcccaaaccaatttgacctcgggtgcaattcggagtccaggaccagtctgcactaaaacaggcgcccaggtcgcatacgtgctcgcattggggcgttctttatatggatggaaagctaagaagataacatttccaatggttctggtcccacgcccaaattctttccgagtcaatgggaatcgaccgaacaagttgacgtccagaatctgtcccggtgctgcgtcaccgtatttgggcctttgggccatgtatcgtgttggaacccattagggttgtatcgagagggggttgcacgaccctaaactctatatatcagtaccgccgccatctttaggtttttgggttttgcttagattattctgtcgagagcagtttcgctgttagatcggtttgtaagaccccaactcgtgagcttaatcattcatatgcaattttggttgttttctatctcgttcttgtttgtgttcttcgattggcaaacagggattagccttctcggtgaggtcatccgcgtttcgacaagggtgataaccagaggagatgtggtgctgcgattgcggggctcaagagcgtgcgcgttcaagaagccggatcgatttgtgtcgcgactccacccaaatcgttgtttatcagaacctttcggaagatcaggaaccctagtgcacatcaaatggattcacatatgcatgcttgggattctgtcaggacataatttgtagtgagcaattatattgttaagaacttagacatccctttgatgatacctttggtaatttataaaatgaaagatgatatagtagtaccaactagagtacaagtgttgttaacaacattccaaaagttgctaatatatttcaatagtacatacctctactttcatctcattaactgaacaccaccttcacttctcactgcatgtataatgttaagtaccaccttagtgaaataaaacaatggctgtaacaactacatttgcttaccaccaaaaaaattgattgttatacccaaatactcagttatattgtccttgctgattttacaatactttgcgctaagcaatatttggtcaaatctgtaatatgcatatgcacactttgatgttttaaatactctgaaagcattttccatattaatttggcagctaaatggactttgcagtagttatattcagtgttgtgaatgtatgacatgtggtataatttagtgaatcatatgagacttgttcacagctgtggtgagtgcttgtggagtagtactactgcctggataacacatgacatttgcatatttacatgaagctgaagcaaattgaaattaatacttccctgctgatgttgttttattaatattgcaatagcaatcgtaattatctgaaaatgtcggcttgttatttaacttaccacttgataataattgcaaccacttgataagctatgttgttgctaatattatgggcagttaggttgcagccattccatgtgtgcttgctgtgtgcatcgtactgtactttatgcaatacatatatgcctgtgtgcttgtagtttggtagcttctgtactttatgcaatacatatatgcatgtgtacttcttgttcactctagtttgtttctcttttgctgaaatgcagatgagaaaatgtgctaggtctttcaggaatgcacctctcagattcattgctgagcaccatgctgtcttcagggggaggtgtgttgtcggcaaccgttcaagtgtcccaggcactgaactggaacagcagttgcagccagccaacgcagaactcctcgatgttgaggaccttgtcgacgtgccagatgcgccacagtcacctgatccaccatcacggtcaaggccaaccaggggtaggggcaaaagggtggcaacaccggctagtgggtctaggggttccaaaaggacccgcagtgactccaccggtgaggctttgcataggctcgctgatctgagggttaagtctagtgagagtaaggcacaaaagcagcgagaacgtgaggctatgagtgctcgtgcatgcattgagttggtcaagtctgatgggcacttatttagctcagatgtttaccacatgggggttttgctctttagtgacccatacttttgcgagttcttcctaggtgatgccattaccccggagatgcgtgagtactacattaggttccactatgccatgaagtttcctaatggtggaggatttttccctccaccatcttgctcagggggttggtttccacctggtggtacacggtttgatgggggtgatggggggaccctggggatgatggtgctgggggagccgacggagctgcagtgtgttgagtgggtatggtgcttctgctagtgctattgtgtgctgttgtgtgctagctgtgtgttatggccgtgctgtgtgtgcctctgtgagttgctactgagtgactgctgctaagttttgctgctgctggtgcgactgaagctgaagttggttgctctgcctttttattccatcgttatgttagtgaaataatgtgttcgatttttaaatcgaacatagttatgttatatgcaggttgatttgtattgatgtaagaacaattcggcacacgttgcgtattaatctaagttggttgttctaatggaataatttattttacactcactgctaatgtgcaatattttttgttaagttataaacttgtgtttcatttattgtacagtcactgcacctctcagattattatctaacttttattttcatattgtgcattttttgttcctttcacatacactaacgacaacattatctcagtttgcacttgtattacactgtttatgttatgaacatcagagatatgattttttttgtacatgctacaacaactttccatttcatgacctaccaagatgagcaccacctcagggaacacttcagggtctaaagatggatacacaagcgaggaggatgaaacaattatggagttgttggctgatgcttttcaaaggaatgtaagcacacgagcaccaagacgggtacctcagcagtcgggcatgcaatgggttatggaaacaatgaacaacccagagcagtgccataacatgtttcggatgagagcggaccagattcacgctctctacaatctccttgtgagcaggtaggtaccacttgcatggtacctatgaggtatgtcctatggaagcaattggaatgtttttgtacgccatggcaggtggtcattccgtgaggagcgtcaacaataggatggttcgttgcaacgctactatgaatagatattttcacagggtgttgaatgctgtcaatgagatggcagccgacatcatcaaacaagttgatccaaacaacttcccgcagcattaccggcttgcccaagatgatgcattccttccctttgctggtgttgtaggagcaatagatgggacgcacgtaccgcttcttgtgcgtagagataattcaattccacataggaaccgccacaatgaaacttctagaaatgtgctaaccatcattggttgggacgaacgagttatgtttgtagatgttggttggcctggttcagtacacgaccaaagagttctatcggaggcagttcgccgctatccatttgcttttccacggttgccatggggttagtacagtgatctaactaagcttgtgttatagttttcataattacaaattttcatttgtgtcgactagtaacacttccaattatttatatttcagggaaatatctgcttgttgactctggctatcccagtaggtacggtttcctaccaccgtaaacaaatgttagataccatgttgatgatttcgaaggcaacgaagctccaccaccggttggaaaggaagagactttcaactacatgcactctgccatgcgtaatacagttgaaagagattttggggtgatcaagagtcagtggagagtcctgcggggaattcctttatatggagaggaagctgctcagacgaagattatagttgctacttttgctctccacaactttatgactgatagtaatgacccccacttcatgacacagaaccctttgtacaacgggtacccccgtgtgccacaggcgccacccctccgcagttggtacgactccccccaacagcgaggaagctatgtcgacttatcgtgagactattgcgaatcagatgtaccacgggtagaagtgtatgttcaatatttattttaacatccattttcgaaatggatatgtatcctactatttatgtctccttccttccatcgaaaactatttatgtatcggacgcatttatgtgcaatatttgtttcactttaattgttgtgctttgtcagcagaaaaaaaaaactcaaatttcgccaggccgttagctaatcctaatctgcagcattaatttctaagtgcaatgcgcgtgtgcttctagctttaattttcttttccccaccgttatctcctccatacgtgacgccgtgcctgcgacagccatccatcaggtccaacagtcgccgtccctcagctccaacggcaaccgtcatcagccgctattcaatttttcaaagtgtgcagctgctgcaagccctgacatgcggctgcagtaatttagattatttctgatactccacgcaacactttggaatgcagcctaattccatgatatatgggcgtttgatttacttggggcgaagaagagtattctatcctcattttattttttttcccttagtgaccttttgtgtttctcgaaatataattttgccactactttgtagcttatataacaatgatttttctatattgtactgttattaaagcatatccaaaaacaagtatagtaaatataaatttcatacagtcagacatactggtggtcaaacttttgtaagtttggtcgtataatttctcaaaggactacctttagctaattgcagccatgctctctcattagcatccactaacatgcatgaatagctgttttaattagcttatgcattaccattccaactatatttctctaattaatcctagcagggtggatctggcaatggagctagagctgatgttgctaggaagatgaaggaggttgatcatctattggcaaaattagaaaatgagggagtggagataaatggcaagatagctagtattattgaagattaggtagctagaattcaagctgaagcatcgaggtaattaattacttggaggcgctacaacttatttcatttttactgatcaaatgaaacgatcctaacattcatgcattacgcacatccttttgatagggggcacgtcaataacacaagagagaatgtgaagacgatagtgcacgctcttacatgtattagtggtggtttcgtcttgggagcagaatggtgcaaatgtgccctccgtgcggcagtgtgcaagaaaatcttttttggttaaatagcctagggcttgtaggtcaactctgtttatggtatgtacgaccaagttagtaatcttggtaaaacattctaagctaactatggtatgcaaaatctatttatgttgtctgataattgttgtgctatttatgctagttggttttcattcttctaaacccatattggtttagagttttctagatcaagatggttgacgactccggttaacatcgtagggctttcggtgattcatcatggtgatcggaaaacgtgtcaaccatagttactcactcaggcataaaatataggagcaacttactattagattggacatgaattacactacacaaacgaccgcttcatccgactgagacgtacgacgatgcatctccaacgtagattaatcccttgcccatagccgcatgccctgataatagtacgagatgcattggatgtcgtatgtatagcaaccgagttaaacaaattcatgttagtcaattcagttgtaggtttgcttgtgggatggacgggtagctttctgcggaagatgggtaggattttcggcttatgttgcgttgtgggcttctgaacactcaggcccacattgttgtagtgtgctgttcgtggaataagttcactttaggttcttcatctagacgtcgagtttgacttaattacattcttcaaccacaaaaccggggtataacacatccctcatcttcctaaacgatgcaaatgtagtctcaatattgaaggtggttttagctgatggggtgctgatgtgaccacataagcaaacataaaaaataaccacatttttagaccagagcggcggctggtggaatagcacttggcaccgacggcctcgattttgcatggcacggggtggggcagatcagcgtggcgggctgccaactccccgacggcgatgcaaaccggcggattgtgggagtggaagcgacgatggctgtggtcaagaaatcggagggatcatcggcgcaacaagcctctgtcgcgttgatttggagtttatggtgtcctcttcatcctctccggcaccatccttctcctctctgccgacctgctgcttgctggatctagcagcacccatctcatcgtcttcaccgctgcgggggagaacggagatgggtagtagggagcaacgcttcatcgtcttcactgccacggggcagacatacagtggccatggtcgcaccccaatgctcaaccacatcgtcgtcaccactttcaacatcgatgcgcaacagtcatccttccctcctcatccctctccgctcctatgtcagcatcaaactccctctccggtggcatgacgacgaaaacagcctacaagggacagagggaggcaccaccactaccacctcctcaacctcccctaccatggcagcaagggacgaggttcggcggtggcggcacggcacctgtggccacctcccacgccacagacgccatagacgcggttgcccccaccatagccgccttcaccactgtcgtcatggtcaccttcgccgtagcggcctcccctgccaccgtgcgccgctcccggccaccgcgcacccctccttttcccaccggctgcttccctgccatgcctggatagaggagaggggagtaggggagagagatgaagagaggggagatagggagagaggaggaataagaggagggggtgataatgacatgtggggcccacgtggcccccaccatttttaattttttttgtggaactggcatgtgggcccacagtttttattattttccaaattaaattgccacgtaagcgccacatccaatgatgattgattcaaattagccacgtcagcttattttgcatcggttttgacagttgagggacctgttgtatctggtttttcaattgaaggacttacgaaaatcggattcgtcgacaagttaagggacctccaatgaacttattccgctgttggtcgtctgtcgttgggggtcacgcaggtccaagaggccggatggcctagcccatggatctctcagtctcggacaggcaaaggcaacaaattaagttgagagaacccaaaccctaaccggcgcgcccccctcctccagattcctccggcgtctcggtgtcatggcgatgcactctcatgattcgccgccggcgaactcccttcctgatcccacccctgatcaggtactagttccgctcttgttcgatccatctacctactatagctagctagctgtcgactccctggttctgacgagtctatcagcgaattaacctgcaggccacgatcaaattaactgttttttgttatcttccccgagacaataacaaatataggggtttgatgcaattacctagttcaattcagacccttgttatcagaggagttctgtaatttgaccgctaatgatgaatattgccaattaattaaatatgcacaataagtgccagattgcagaggaggtctatgcaaagatatgtgctaaacttgttacttttgcttgaaagaaagcggtgacaatcagtttttttcttaatcaatttgtagtgtagtccgcattgagtacacgtggatatggtgggggcaaagaagagtattctatccccatattttatttttttttctcaagcctggttcggttaatccctatgagggaggaattagaggaaatttattccacacctattataatgtgaaattattcttcctcaatcccttctaaaccgaataaggcctttgtgatttttgtgtttctcgaaacataactttgccactactttatatatagcttcactagtccagatccttccatctgtgacgacccctaacaagattggaatttgcgggccgtcacaaggaagtaatctcaatcagtccaaagtttcgtctgattgagatatggtcgcacagccatggtagatcggcataaaactagagcccgtcacggatgacacttatctgtgacgggccatagttgaggcccgattgagatgagggtgccatatctcaatcgggccctaaaagaagcctgtcacatatgagggtcatctgtgacgggctccaactaaagactcgattaagataagtttaatgcccgtcacagatgacactctttttttatgggcttttattaaggcccgatagagattacttgtatgcccgtcatggttgattgttttaggaccgttacagatatttgttgcacagtataaataccctccaccacctagtgtaactgtatcccactgttcactattttggtaggaggctgtagggggcgattctttgtcttttttccaaggaaaacagaaaattcccaaaagtgatcaaaatggagcaatcaagtgagtaatattaatcattaattgagcaatttcatcacgtcttactttaacaatactgatcttataagatgtgcctctaatttattttttttattttgtagcaattgatcgaagttggatgtatgcgaaattgtgaaacatcattttccggagtacagaaatggtgtaataaattttatgaacgatgcggaggaggataggaaaagaagaaacaacgattacatgtgttgtccatgtgcagattgtaagaatgagaatatgtttgatagcggagaggatgtacacggtcatctgatacaacgaggattcatgaagggctatacatattgggtgaaacatggaagcaagaatcaggaagtggagcagcagcagacagaagtggtgcgcataattaggaagatgaagatgagcatgacatgtttataccttctccattaggcggtgaaatgtttgatgtggatcacgatctgctgcaagacatgttacatgacgttgaggacccagcccagaatgagagagattccatgaagttcagtaggttggtcagtgattccgagacgcctctgtacgctggatgcaaagcaaagcacactaagttgtcagttaccttggacctaatgaagttgaagacaagtaatggatagacagacaagagtttcacagatcttttagaaattttgaaggctatgcttcttgctgagaacacattgcccgagacgacatacgaagcaaaataggttctgtgtccactggggttagaagtccgtagaattcacgcttgtccaaacgactgcatattgtatatctatgtttgtttctgttatttttgcagctggcatggctagcaaaggcctgaggctagccaaaaaacaaaatttatttttttgtgcattatagtcatctgtgacgggacataactaaatgcccgattgagatgatggtcatctgtgacgggccgtacttaatgcccgattgagatgagtatcatctgtgacgggttctagtttaggcccgattgaggtaagtagtcatctgtgacgggctctagtttagacccgattgagatgagtatcatctgtgatgtgctctagtgtaggcccgattgaggttagtagtcatctgtgacgggcgctagttgtggcccgattgagataggtcatctgtgatgggctatagtttgactggtcgtctgggtcaaagctatcggtggcgggttcatccgtgacggccgtttgcccgattgagataactcttcacatcagtgacttctagcctgtgacggacgccgtgcccgattgagatggggcttaccgcccgattgagatgagggtatccgttttagtgcttctatatcaattattttctatattgtactgttattaaagcatttccaaaaacaagtatagtaatataaatttcatatagtcggacatatgctggtcgtcaaacttttgtaagtttagtagtacaatctctgaaaggaccaccgttagccaattgcagccattgctctctgatcattagcatccactaacatgcatggctagctgtttttagcttatgcattaccatttcaactaactatatatatttctctaattaatcctactagcagggtggatccgccaaaggagctagagctgatgttgccaggaagacgaaggaggttgatcatctgttggcaaaattagaaaataagggagtggagatagatggcaagatagctagtattattgatgatgggatagctagaattagagatgaagctggcgaggtaattaattaatttggaggcgctacgatttatttcattaatttttactcaaatgaaaacgatcctaacattcatgcattatactccctccatcccaaaatgtttgacgccgttgactttttttaaaaatgtttgacccgttagtcttatttaaaaaatttaagtaattattaattatttttctatcgcttgatttatttttatgcatacatatagttttatatatttcacaaaagtttttgaataagatgaacggtcaaacgtgtttaaaaaagtcaacggcgccaaacatttaggaaggagtgagtatacgcaaacatccttttgatagggagcacctcgacaagatcagaaaagagaatgtgatgaccatacttgtcaccgttgcatctgttgctgttggtttcatcatgggagcggaatggtatgaactgccttccgtgcgttaaatcccgaaccaagagaagacacgagggccaagagtagacgtgcgtagatcgagatccactctagacttcttctgtttatactccctccgtcccataatgttgcaaccatcctaggactacgaatctgtcctggactggacagattcgtagacctagtacccatcctcggttgcaacattatgggacggagggagtatatgatatgcaaaaccaagtattatataggtaatcttggcagaacaatggttgtcgtgctgcagtattatatattgtgtgctttggcataaaacttgaaactttcatctgaaaaggaaaacatttcgtccacaaaggaagggaagagtgtgccaatagcgctgtcggtgacatggggccgggggtatcgtgactagaggcttgggtagccgcggtcacccacgtggcctgaccccctcgggggggggggggtcgggcccgaggatgacgtggccacccctccctctgtctccccgaggggtcggaccgctcccgtttcggccccgagggctggggcgccccgaccccctgtggttttggcgccacgtgtgtgggttaggtgagcacagcgggctcacctaaccgcatttatagcaggttggacgagcgcgccacgccgcatttaatgcggcgcagcgcgcgcttatccggtccgagaccggtcgcggtgtgtgaccggtcgcagaccggtcagatcgcgggttaggtggcaacaggcggcctgtcacacgcctcgccccgtcccgtcggaataatgagagcttcctggctctcgtccctagccggagccggcgtgctaactcctggagttggtatgtcagtcccggtcagatccattccaggcttcagcgcaagtatggcaaggaagtcgctggccattaaatgaaggttgaaatgggcgtccaccggaaaagcgggcgagcggggcaggaggcgtgtgctctgcttgtcagaggtcacttccggctgtagactagccctcattgtaaaaagcatgtttcctttcttaggtagctgtaggcccttgtggtgacccctgaccagataaaaaggaggcccaggcctaggagagaaagggagaggagagaaaagaggaaggaggtttgggactctggcgaaggggtgctagagcctgaactctctctcgctctccggctctctgtattccttcacgcacagatccaccagaacacaggagtagggtgttacgcttctcagcggcccgaacctgtctacgtcgcccgtgtcttgtgcatttcctctctcgcggacgttcctcagatcgagggcgaagaacctcacttagcgcccccggccgaaccggcaaagggggcctgcgcggtctcccggtgaggagccccacgctccgtcaagcgcaaatagccctctcgatatatcatatactgttggtgctatagtatggtcgtcttcttcttttcaaatctctactattataaaaattaagtatattttcgtggtccgtcatccgtgtttgagccggttataaaaattgaagatatttccgtagttcatcatccgtgtttgagtcggttttaattttatgttttggttttaatctatatctcttctctactattataaaaatgaagatgtttttaccggtattttggtacgtcattcgtgtatgggtcggtttttaagtttgattgcttttggaaatacatatccgtatttgagtcggtttttaagatcgtgaatttcatcttaactaaaccatataacaataataagattaaaatagacttcacctgttgcaacacacgagtattttttttctagtattatagaaattgatgacgtttttgtcagaattttggtacgtaatccgtgcttgagttaatttttgagttggttgtacatcacccgtacctaattcgacataagtagaacaactattgtacatcccctcctcctcctagcccaacccaaccgtcccacaccatcccaccggcaccccgttccgtgcacccctgcctcgatcgacgtttttttctctcttttttttctttttctccttttcttttctccatcatcatgaacctctccctctcctccccctcttctgttttctcatccttttctctttttttcctttccttttctctttcaaaattctcttctcatcaatatttttcttaaagttatcattgtttaaggtgtatatgtggcaagtttgttactttataaatgctttcaatctacagtaaaaaaactttcactaactaaataataaaaatttcaatatatggtcgatgaggcatagtaaaatacccaggtatcgatttatggaatggccacccgattgatttgtgaggttatggaaagctgtacgtaagagattattcgtgtgatgacgtatgaagcaagcgcaacaaccgggttcaatgctataaatacagccgggttcaatgctataatatatgatttctgattttgttttaccattattttgttcgtctcgttaggatttgtcatttaaattgatagagtttttatcaatcgtgaaaattgtcttcacgtgttgcacacaagtatttttgctagtaagatgaaaataatgttgtaacacataaaacaagaaagctaaattttaattattaaaaactttaaaaataaatttatttgatattttaaattaatttttattaaaaaatctttcatacgaaacatacaatttaaaagtttgaaaaaaaaattaaagttgctaacgaaaacacgaaaaatgaaataaaatctgtattatactccctccgtccttaaatatttgacgtcgttgactttttttaaaatatgtttgaccgttcatattatttaaaaattttaagtaattatcaattcctttcctatcatttgatttattgtttaatatacttttatttatacatatagttttacatattttacaaaagtttttaaataaaacgaacgattaaatatgtttaaaaaaatcaacgcaaatatttagatacgggggagtaattaataccacccatacgtatacatatattctctccctaactacaatccaaatctagcattactggcgctagctacctgtcacctgcccaactccacaacaacacaaggcaagggtacccaatcgcgtccacgtactattccactctctaaccttatcatcacttcaatacacaaacccagcgcgagacttagcagtgtctagtgtcagagcgcaacagtagcagctcgatcgcctcgcctcgcctcgtccatggaggacgacgacgacgacttcacgttccccgcgccggcggcgacggcgacggcgacggcggtggcggcggcggcgacgtcgtcgctggcaccgagcagccagggcggcctcctctggccattctcatccacgatggctacggcggacgacgacgacgcggcgtcgggcggccaggcggtggcggcgacggcgccggtagcagcagcacggcgcgtcgacgaggaggaggaggaggagcggatggaccagctgtgggagcgcgaccgcgacgcgcgcgccggcgacgaggagaggatggacctgctgtgggaggacttcaacgacgagctcctgcttcagctccggcgccgccagcagcagcgcgcggcggccgggacgccgccgtcaccgtcaccgtcacccgcggcggcggccgacgacgacgacgacgaggagacgccgtcgtcgtccccaccgggaggaggaggagggctgtacgggtgcgcgccgacgatgctgagggcgtcgtcgcgggcgggcgccgtgggccagttctacggcggccgccgtggcggcggcggcgggagcagggcgacgacggggtgggagctgctgctgaggctcttccggaagctgttcgccgtcgacaagtcgtcgccgtcgccggcgccgccgtgccgccaccaccatcgccgccacgggagcatctacgtgccatgattagcgctagcttactcttaattactattctctcgccgcacatacattcgcggcaaagtaattaattaacctactgtgtgtaattaaaagcatcttctggagctcagctcagtgttttttttttccttttcaaaattaaatgcacaccatgtatgcataatcgatcgtacagtcaacattaggatttaaattcagttataaatgttgaggagttcttggttttgttttttctgggtaagaggaaaattattgcttttgtttccccatttgtaagttgcacgctagcagtatgtacatgtttgtttacatccttcaagtggcattttccacataccagatcacatatctaaagactaggaatataaaatcgaattaactgaagagaaagaaaaaaataataataaaaggcaagaccttagtaccttaccactaacaaaagttactaatgttaaaaatctggatatatatatgtaacagtgcgacagtgcaacagtgtactcgcagtcgattaataaagcggaccatttggtcattaaattaggtggcagatagctcaaccagacaatgcaattagttattattactatcattcacattgatatggaaatttggaaagtgagaagtagtggagatagaaagggagagcagcttgcaagtgcaagttctcccaaaaaaaaaaaaaaagcttgcaagtgcaaagccttgctgctctgctgctagtgctgagctcgcatgcagagatgcactgtccaaaaggcagcagatcagcagagagagagaggagagaaaaaggagagggacagccaacgaccaacctgattgcaacagcggagccgcgcgtacggctttgattctctcatctcatctctctcacggctttgcaaattgcagtgcagcatcgatcgccaccaaccttgtggacaatcatcatccatgggacctcacattatgttaggatgatagcttttgacaacacacacacacacacaaaaaaaaaaagaagaaaggaacaaagtttacatgcttaattactttgttaggacaggatggctgtaacgagagagcttatctaacgccaaccactctggagcagcagagattcagaaaggcagggacatttgatgctgtccttttttttttttggttcagtttggtaagattattcggttcagaaacacagggattttagttactcgtttggcaagctaaaatggggattattcgatgtagtgtaatgatgttacaataacagatttcagcggtgcaaaaaaaaaaaaggggggggacatgtatgtatgaaaccattggtaatgctacatgtacttggaaacctggaactcgaatacaagattaaattcagtactgagctatgtcctcaagctgtcagctgcactgcacctcctaacctgaagctccccactccccctacaaaaaataatacaaagatgattttagattgcaattcatcctgaataaatcagtgttttgcaaaatgcagctctcttttggtaaagaaacaaaaaaaaaaaacttggagtcgctgaatcactgaccaagtggccatcacagttcatccttgacagattcagtcgtggttgcttccccaggcctggagcccttgttcttggtgatgaaatcgatgatctcctcggctgtcctcccgtcgtagggcaggaggttccccccagacgagtagaagtacatgcttgggtacccctccaccgcgaaatctgacggtacatcgttggcagtaccatcctgcaattcagggcaaacgaattggtcaagaggtgaacggtgagaaacgcgcgtgttctgataataatctggtttgttgaatttgaggcaaaaaaaatgtcaaacttgagtcttttttttccccaggcatgacatgtgaatttgatggttgctttttttctaaaaaaaataaaatgaatcagtctgattgttttgttttgtttttttaagaaataaatagatcagatggtttatggatgcatgctatgaaggcatttttcaatcatatctttgacaaggccagcatggaccaagcaatggagagagctcataggtagggtagattaccatctttgctatgacgacgtcttcatcatctttcaatgaaactgcaacctcttccaagatcggggccagcttctgacaatgtccacaccatggagcatagaactcgagcagaactgcaaaaggaatttgaaaaaaaaaaaacagagaccgaacttatgttttgacagcttgagcaaacaaattaacaaaatggttaagatgttgacgacgaagcaggcatcaggcatgcagggcataacttaaacaaatatctacctcctccactttaatataaggtgttttgattttatccaagtcaaagtttgaccaggtttaagaaaaacgtaacatcattttcagcactaaaaaaatatattacaaaaatatattcaacgctagatttaatgaaattaatgtggtgttataaatgttgctacattttctatgtactcggttaaacttgaaaaaaaattgcttgtaacaaaaaccaaaacatcttgcattctgtaacaggtcgagtggtaattaatacaagttcttcaagcaagtagccaagaacataccgtttttgccggagttgaaaaccacctctcgaagattgtcagcaacaacggtcttaacaggctgatcgttaacctccggaatgggttctgatttaacatggggtgccaatgttccttcctgcataaagaaaatcaaggcaaactgactaagcacgtagcgaaactttctccggtttttaatgtatgacgtaattaaccttttatcaatgtttgaccattcgttttatttaaatttttttatgcaaatatgaaaacatttaaatcatgcataaagaacatttgatgataaatcaagtcataataaaaataaataataattacataaattttttgaataagacgatggtcaaacttatcccaaaaatttaacagcatcagaaattaaaaaaagaggtagtactaataataagtaaccttcatagtccctagtataaaatagtgagactaaatatcacgcaagcgacttaaagaacccacagaatatatatcagggaattagtaaacgaggaagaggataatagcgtcagttcagaaattggcttactgtaaattccttcaggtagggcaagatctgatcaggctccacagttggtttgatatacttcgacttcgatgctagtatgaaaacgaggggcacttcactctctttaagcccaaaatactggaacattgtgcattcaaaaatggtcagacagcaggcattttcaactcttggacattgtttttatacgaaatgttggggcaaagcaatgtactaataaagattgttatggaaaaaagaaggcaaaagattacctggaaagcaccctgagaggcagtgacatcaccaatcagaaagcttatgttgtttgcgctgtattgatttgcagcttcatggaactgagttctgaattcctctgctctgtcatcactgaagctcaggaaaagcatcgcctgcacgctcaaaatcaggttcagaaagaacagatgatcagaccaagtgagacaagagttgcattctcaattatggattccagcagcacattgaaataaaacatgagagacagtgaaaatcgtgtgcacatgataagaggcaatcatggcctaaacaacaagctaaacagtccagtgtaggcaaacagagtgagaagtcaaccaattgtctgtccttactttggtgccggcattgtcgaagtatttcagaaggtatttctggtttgccggactagtgtcaaaggtaaccactgtagggaaaccagaagactcgataaacttctccaacgcatctctatcaaaatcctgaaaaataaaaacaagaagcaatccaaatttctgtccatttcttatccaaaatgtgagctactactagctaatcccttggaggatattcatatcccctcgtgtatatttttgttccaaatttattgtaaatagctgtaaatttttttgaaaaaattggcaatataaagtataatgatatttatcgattcaccagaaattaagtttaaatttgacatgcaccttgaaaaaaaaagataaattcgggtatggacactaccactaccctattattcatataccgaatttatgttttttatatatcaatgtgtaagttgagtttggatcttacatttttttagaggtggtatatgtatttgtacgaacgctgtcaactttttacagaaattttcatgaatcataactacttggatgattttaagcaaacaagaatacagagatacccctcccctggagggatcaaaacagagcagagtatctctgtagcattaattttcagctagtgtacctgcgagtcaacgaagagctcgtcgaagggcttgaagaggcggacgagaggccccctcaccgtccgatcaccccgtgggaggacgccggcgtccgtcgtgtgccggaaatcgtagtcggccctcatcttctccgccaccgccatgaaactctcgaactcgctgccgctaagttcggggaaaactccgacctgcatcagcaagagtatttgactgatgcatcgggtcattgtttcgcttatttgtatgtttatccgaatcactttatttgtaaataaaaatattatttgtgagtaaaacttttatatatacatataaaaaagtaaatgctatttataattaaaaaacaaaaaatcaaatgtacttaaaaaagtaaatgctatttataataaaaaaccaaaaattcaaatgtaaaattaaattttagtctcccatcgtttggctctttccctaataagccaaaacagcttattaggggataaaaataaatttatagataaaactttcatatatatatatatgttcttgatgacttaaaagccaatattaaaaaagaaattacgttaaaaatatcttaaaatcaatcttaaatttaagtttgaaaatttaaaatttgacttattctttgactatttaggccatccaatgagagcctttagcttgtaagtataagcataaacagctgatgcagagagaagaggaggtcaaactcacgacgaccacgccgtcgttggcgatggagtcggccgctggcggcgaggcggaggcagcgatctcgacggaggccgggccggcctgcctcttgaggtaggcgacgatgccggcggcgtcccggggcccggcgtagttgtgcgacctggcgccgcggtcccggaggatcctgatggtggggtagccctgcacgccgtgctcgccggcgaggccccggttcaggtcggcgctggcgtcgaccttggcgaggacgaccggcgggtcgtgcgagcgcagggcggcggcggccgcctcgtactccggagcaagctggttgcagtggccacacctgcggcggcggcgaagaggatttggtcagctgagctcaaggtcaaaatcagcaaggcgccatggcgccgagccggcggcgaggaatggggtttgcctgtacaatgtacgtaccatggggcgtagaactcgacgacgatgaagtcgtgcgcccccaccacctccgtgaagttgccggcgtccagcgtcagcaccgcctccccctccgccgccgccgacgacgctagcagcagcagcgcaaatgccgctgcaaatgccgtggagctcgccatcgccggagaacacagaagaggcgcgtggttttcttctccctccgtgccttggcgccggccgtcgtcgagatccaaacgacgcagcgcgctgcgcgaggcggcactaggttttgatggccatggcggcggcggcggcgtggccggggctcgtggccacattgggattggttctttgtcaacgccacgtggcctgatgcaagctttccattttaaaactctggtggtgagcacaggtcagaagctccggatcagagcagacaaaatagctgtgccactttgttccggattaagatcctgtacgtttaaagtcactgtgcttttgttactgacatgtggatccgatggatttagatcgcttttgttactgcatgtggatccgatgaatttagatcctctacgtttaaagttactatgcttttgcatgtggatccgatgaatttagatcctctacatttaaagttactatgcttttgttatgacatgtggatccaatggattaagatcctctatatttaaagttattgacatatgagtcaatggttcatcggatccacatgtcaatgataaagttacatgactttgaagattggggatcatgatccccttgtttaaatctttgcaaaaactgcttgtaatcttgtctcgtttataccattgcaaaaaaccttgcaaaaactgcctgcttgtaatcttgtcttgtactcttgtttataccattgcaaaaactgcctgtaatcttgtgtgctttatgatactttgtggtaaccaggtgagatctctaacacccagtattgatcgaaaatttagctaaaatttactgtttcaaaattgaattatcaaaaaccacttgaaatttcactgggtatctactttcgtggtttttgatcggttgtcgtccgaaatacaaaccctggtggaaactggtggggtggcaagaccagatccgacttactagtggtgtgtttagttcacgctaaaattgaaagtttgattgaaattagaacgatgtgacagaaaagttgaaaatttgtgtgtagaaaagttttaatgtgatggaaaagttataagtttgaagaaaaaattaagaactaggcaggcctagatcgaattagcatagcatgttcagagttgtactcctactgtcctacacatagcacatctagcagctagcacgagacatctacagctgggatacatgggttgaaactacaagtatcgttgttatggtaaaatactccctccgtttcaaaatgtttgacaccgttgactttttagtacatgtttgaccattcatcttatttaaaaaatttaagtaattatttattcttttcatatcatttgattcattgttaaatatacttttgtgtacacatatagttttacatatttcacaaaattttttgaataagacgaacggtcaaacatgtgctaaaaagtcaatggtgtcaaacattttaaaatggagagagtacatttctcagttccagtttgcatgtcacaacatgttacatccctacctgagcggcatgggggcaaatggagctctcattcaagcatagcaaggtcacatgtcaagcattacaaacaaattcagtttcatcgcgtcttgcttgtcttctgcacgaattcgtcgtctttcatgtacttctcctgcacctctgctgttgtagtcacatgtcaaggaacaaaaggaaatgtggaaaggtgcaagggggctataatagtgatgtatttcatggacaagagaaagaaaaaaaaaacagtaaagcagcatccaaggatcatacagcaggcatgcgaattgccttcaagggtaagcactagtaaatccaaataccagtctggaataccaacattgccacaaatactacaggctccatgtgaaaattggcaagttgcacagccataaatttgctatgtaaggtggtctagtgctgttccattctagtgttgttccatattgtaataatttatgcctgtacgtgccagaggggtgatttgaatagagtgcttctagaacactgaaaataacttaaggtatgagagtaaagatatttgtttgaataagctaggtgctagaagagacagtaaaggatatctgtagtaatcccagtcaagtggcgctgctgcaattttactgaactcaacgacactgctgtctatagatgaaaatatatagccattgcttttgtcaatcaatttcacaagattgccgacgctttccttgtcctagaggcaaaaacaacttgtaagaccaagttcacagggatcttaattgaaataactgaatctttcaagtaagtacctggatgtccaaagttgtaaaattgaccaagccaaaatcgtcaatcacatcgcacagctccttagtaagtttccttaagcagatggaacaaaaatattataaataacccaagcaataaaaataattacaaaggtgaaatccaagcataagagcaacattatcagagattttgatttgaataattaaatgattcccagggttactgcatctcacttcataacaggtcacactgctatgttaacagacattgatttaggatgatcgtctatcaatccccaagaagcaaaaacaatagatgcattcacaactcctgtgtttggtttttcaactttacccaagtacatattcttaatcttaaacaggttgagcatcggattttttgcacaaatatattagttgcaacctttggtttctcaataaacaaagaaatggacaaaagggtactgctactgcacacacatttcacaatattcccaagagaactggaaatgcctgcttaattacatctaatttgatcaagtaacaaggtttcaataagtgcaatgtaactatgcaagtatgctggactgcatatgcatgactttttgaggcagtaaagttatgtatttgctgcttggatttttatgttttacctgtacttggcagaacgaggatcttgatctagatggcgttgcaaataagacagatcctcgacatcagtgtagaagttgaggttgaatgctgccaacaaaaaagatgagtaaatagaaacatgtaataatcaactaaattctgctgcaggtaaagcagtacctaagtttccatagttctcaatgaggtcaatctttgacaaaacattgatgtgtggcagctccatgtgtagcattgttgacagtgaaagaagcaatgcactcacatacttcccaggatcacagcacaaatgagcatcaataaggtgcacggcagtcagctgtagaataccaagaaatattgtgggcaacgcaattcattacataatcaatgaactctggataggatttaacacagttgtacccgcaagtttagctttttgataagtttgtaaataatactcctcgcatttgagtgtagaaagaaaagttccacttgacccgggaaatcaaataacagatagtgatctgcagaaatcatcaccaccattgagcaaatcacataggaaatcatgacaataaagcagtatctgtataggtattttagtaacccctactatgatctttcagaactagctcaacaaacaaaaggtgtacttgtgaacaaactgaaacacaatcctcagaataatggaacccaggagctctaattgttcaaaatctataactttaattgggtcctacttttctagaactgcaaaaagttaagacttcagaccaaacaaacagttgtgagtaaaccattttgaaaaggaaataattgaaattgaccaaatattacatttttctctgaatgcaccataacaacaatttttttatcagctgtgcgaacaatatcgatgagatcatgacttctatagaagatctccattttatagatcttccaggctgcagctcatggatatggttttaataaagaaagccagcctataccgaccttcaataagaggtttcaacttttcctcaagccagtcgatattcttctccaagtaatccatgcaatacacaaggcctgacacaaatttcaacagcataccataagcgaacatacaaaagaaataacaggtttgattcctgaagtctggggctctgggccaaacctccatttggaccaagcgaatgctcagacatgacatcactcagttttatgaggtcctcaatgtttatggcgcattcatatcttaatcaccgctgtcaaggatacatttcaggtttaactgcagaacaacaatccaacaagtgaaacaagataatatggcaaatggagcatttcagagctcaaagtgcagaggatacggcaacacatcattcgcaggatcgagattgataaccgcaactttcctgcaacgcaacagtgaagcacataagtcaaaacatttagcataattgcaaatttgcaagttggggaaaccttccatgagcaagctccctgcctccatgggagaaaattgcccatctcccctcactctcccaaccttctctctctatcggcataaagccggcatactcaattcgaaatctacctactatctgaatcaagcgacctagttcttgctttccacaaattcctacccgaactgcatagcgagtccatgcccaggaggtaagcaatacgcttctgcaaccaacagaacgcaaggccgaccagaaatttggaacaaacaaacaaacaaacacctagcaccggaaccgcgagcacgaagggagtagcttgcgagggttggagcagcagaagcacgagctactcacctgccgacgagggagaggaactgggacatcccgttgcagtaggtcgtcttgccggagcccggcggcccgatcaccacctgcccgaacaccatcctccgcccggctagagcctacctcctggcgctcgctggacgggtgcaggtagggttttcgccggagatggcggtggcggcggcggtgtcagcgccggcgacgcgaagagaaatcttctagaacagcaagacgagacggctttacttggcccacaaaatataaactcttcgattgctttgacggcccacggcccagagcccacagctcgaggcccacggacaacggcacagtggtgggctttagctcttttctgggtcgtcgcggctgctcgttgcaagcgcatgcgccgccttctcactccgccatggccggcggcggcggcggctgctccggccagcgccgccgccgcctccgccgtcacagtagaggcggtgctggccctgctggagcgcgcgatctccgcgggggacgtgcgccgcctcggcgcggcggtgcacgcgctcctcgtcaagacggcgctcacccaccacaccctcctctccaaccgcctcgtcgcgctctacgcgctgctccccaccccggcggcatcgctcgccgccttcgacgacctcccgcacaagaacgcgcactcgtacaactcccttctggcggcgctggcccggggccgcggcaccctccccgacgccctccgcctgctcgacggaatgccgcccgcctcccgcaacgtcgtctcctacaacaccgtcatctcgtcgctcgcgcgtcacggccgcgagtctgaggcgctccgcgtgttcgcccagctggccagggacaggggcctggggcagcagcaggtggccatcgaccggttcacggtggtcagcgccgcgagcgcgtgcgcggggctccgggatgcgaggcacctccgcgagttgcatggcgcggtggtggtgtcgggtatggaggtgactgtcatcatggccaacgcaatggtggacgcctacagcaaggccgggagggtggaggatgcacggggggtattcgaccagatgaccatccgtgactcggtttcttggacatcgatgattgcagggtattgccgggcaagcatgcttgacgatgctgtgcaagtattcgacatgatgccagcgcaggacgccatagcatggacagcactcatctctgggcatgagcagaatggggaggaggagatcgctctcgagctttttgaaaggatgacaggtgagggggtagtgccaaccccctttgccctcgtgtcatgtctgggtgcgtgcgccaaggttggtcttgtcgcccgagggaaggaagtgcatggcttcatcttgcgcaggagcatcggttcagaccctttcaacgttttcatccacaatgcccttattgacatgtattccaagtgtggcgacatggtagcggccatggcggtgtttgacaggatgcttgagagggacatcatctcttggaactccatggtgacagggttctcgcacaatggccagggaaagcagtcacttgcagtgtttgagaggatgcttaaagatgaagtacaaccaacctatgtcacttttctcgctgtcctcacagcttgcagccatgctggtctagtctctgatggccgccggattcttgaatcaatgcaggaccatggtgttgaaccaagagctgaacactacgccgctttcattgatgctcttggtcggaatcgccagctggaagaagcaagtgagttcatcaaaggcttgtcctccaagatcggtctgggtacaactgggtcatggggggccctccttggtgcatgtcatgttcatggcaatattgagatcgcggaagaagttgccgaggccctgttccagttggagcctgagaacagtggtcggtatgtcatgttgtcaaacatatactcagcagcaggacagtgggacgatgcccgccaggtcagggctctcatgaaggggaaaggattgaggaaggaccaagcttatagttggatagaggtgcagagagcaaaacacatgttcgtcgccgatgacacatctcaccatgaggcgaatgaaatatatgagatgctggacaagctttttcatcacatgttcattatagggggtaatgttgaggagcttatagttggatagaggtgcagagagaaaaacacttgtttgtcgctgctaacacatctcactgtgacgcaaatgaaatatatgagatgctggacaagctttttcatcacgtgctcggggtaatgttgaggacaagcatggcaattttgttttgtgctgaaagatacatcctctggaatgaaacaattgctttagcattgcaagaacaaggccattggtctcaggcatgagggatgaagcccactgatttgccttcagcatccttggtatggcagattggtggtgtgtttcaaggatgctgcaaaggagcgtcagagtccaaaatgtggttattgtgtttctttgagattgcaatcacaaataaactcgtacgattttgattcgtttggaacttggcatcctgaaggatcaatttttcacttgaagatgacaactgacaggacaaattcagagtccagaactttgggccattgcctcggcagagctttacaattgcctgatccagctcaatttgtgagtttgaagaatcaactactgagtcatttactcattttcccccctctgcaatagaggtgttgatttccaatctttgccacgatgatcgtatatttggatttgggaaggtggtaggatagaagtcttcagctttccactctttgtaatttgtagtctttgttattgaacgttcagagtacatatataatataatttttgtgtgcgaagtttgactgaattttgcagtggatgattcagatcggagttgaagaatatgttgtcgtcaattggcaattgacaagcatgaaggcatatatatatatgtctagttcagtctatcaatggcatgcaacttgggaagattacgcccatgttacatttaatgccttttttattaggaggatttgcaaaagaattttggagtactcgttctactttacttcgtccatcacagcttcacaaggcatttgaagaaggcgacaaaaggaaaatctgatggaacaataatgtgcctgagagtgctgaatgtcaagcgccgtatgaggatggtccatttgagcagataacaataatgtgcttggtacattttgcgcgtgcgttgcaaaatggttaaaaaaaaaagaaaactcagcgagtgggcagagcagctttaccattgggtggtggtgaggccagtggattggagtattggaaccatttgaagcagccggaacaagctagcatagcaaacactatggagatgatctgatgatgcaagaacaccatgcaccgatgcacgcaagagacaagaaaaacaagaacacagcaaccggctaaagcaatagttgaagaggagctaactccattcattcgattcgccacaacgtcgagatgatggatgcgctagtcgagtacttcaattcaaggaaatctgcaaaccgatgtggtccgtcgtagcagcagcaaataagtttgcacaagagcagcgtaggagactactggagtgcactgcattggcatgcgtcactggtgatgtagacacgcagtagctggagaaactagccaacggatgaagagccccttttttaccctgcaaggcaacaggtgaaagacagtagtagtagttactatcctcgtggttgggtctctcccgttcgttcgttcgttctccacccaattcgccatcaccaccgcaccaagctcggtatcacctcgtcgatcgtcggctggtgccgcacgcgtcggcgtcggcgtcggtcgtcgtcgtcttttcttgtggcgccggtggtggaagtggaggaaggctgctgctgctgcagcagcaacactgactgccacaaggtattatccatccatccaaccatttctatcccttccgttccgccctatccgatgaggcaggaatgcgggatgcaaaatgtgtgcctcacattgcccacgagcggcatattttgcatagctcaggtgccattggcagaatgtggcctcgtatgccctcctctttctcatccttcaccaccagcagtaagcatccaaggtgtgccagccacctttttactcccacttgatcaatctgatggtaattgcaaatctgatattgaccaatgaacagtgcagtgcaatcttgctcattcagacagaagaactactgcgtcctgcaaaacaccaaccaaatgttactttaacacacactagatcaatagatcatcgtcatcatgttcacatctgcgaaactaatcagcagaacgaggttgggttgggtttttgaagtcaagaacatcacctcgaggctacaaggctagagagttgggatgatcaaatgatacatgccacaaccaaccgcaggcagtacactacgcctgcatgcgcacctgagcatgtgccaacaagaatgaggatctccatcattctcctcccccacagcatcggccaatgtgcgcgcctcgaccgaactgcatcagcacgacgtcatcaccaccagcaccaggtgctgtggtggggccgggtcacccacgctctgcatgacaggtggggcccaccacccccctcaggactcaggagatgttaggttttgcctcacgtgtgctggcaacggcaatggcgttccattgattccccccggcagcagcagcagcagagcaccggcttccagtggcggacatgccctgccacaaagaagcacagcatgcatatgatcccaaaagataaagccaaagccaaaaaaaaactaaagagatccaagagctagaaagatagaggctcaagagaaaccgtgcgagcgacagcgagggggggctgcctccgcaccattggaatgatgaggccaccatgatcttttcctgggagcagcacagaggagttgtgtgagagttcctggaagattcggccatcatgatctcattttggttaatcttatcgagataagcatcttcttgcatctgaaaccaatcgggattgaatcgaaccacagtttcctttgatggatctcttcacaagtggtcatcatgagattgttaaactttctaccaagaaagatggagggggggggggggggtcttatactcttaccacttgagatcgatgcaacttgatggcatggagtcctttcaccaactgggcatttttctagttaatcactctcaggtgaggtgatcctctcctgataattattgtgcctgccaaggcagataagaattttccccagttgattcatgaataatttggaatgattagtgtacccctctgacgcagcaatgtatacaacaggaggacaacatctgggttgcttcttcttcaagtgatgcccttgtacttttgccacacaggtccagaaaaaatgtgcaacttgcttgctggcactcgtgtatataatggctggctgtggtcaaggtgcatatggcttgagaagggtgacgcctgcatgacatgagcaagaatgcaatggtcaggggggaaacaaatagtatacgcaatgatcatgaaaagaaatactgcactagagatgttgcctgtcacattaccttgttctgaggttttggggaatgtacattaaggagtgcctgtcacaatgtagtaatcagctcatgtgaaaaccttatcacttgataaaacttcaaacacttgatataataatctatacagtaagtaattaatacaggcttaaagaaattgctgatagaaaatccaattcaatgaggtaatgactaatcaacaaaaaagtactgatacctaccagctgagatctaatataagccaacaatccttaaggccatcaattatatcacaggctgctggatgaacacttttatcatgcatgtactatggaatgattcaattattatttctgcccccctctgaaaaactaatatatatctctgcacactactgcagccaacgggtacatagcagtgcatcatgaatccatgatccaacaaatgtctcctcatagtatcattatttccctccaaagaagaaaagagaaatatatagaatataagcatcgcaaaatgtcgccctcgcttggctgccatcctcctacggatcagcactcagcactccttgacttgcacgtctctctctctctctctctctctctctctctctctctacatctcactctttcacacaatcacacacatatgctccctataagtagcactcgctcaccaagatcagcaagcttcccatttcaaattcatcaatatcccagccaagttgcatttgactgcagtttgtaagttgcacttgtagttgtagcatgggaggagctacaaacttacctccaggtttccacttcttcccctcggatgaagagctcgtcgtccatttcctccgtcgcaaggtctccctcctcccatgccaccctgacatcatcccgacgctgcttccgcatcggtacaatccatgggagctgaatggtaagtctgcaactgcattgatcaatatgatttcactaatttgttctcttacaagtcatgctgagtgctgatagaaattgcaattttaaggcaaagcactgcaagctgggaaccagtggtacttcttctgccatctaacacaaagtaggacctcatccaatgggcactggagccccattggagttgatgaaacagtaagaagcggcggccgcaatgttggcttgaagaaaacgctgctattctccattggagagccctctgaaggcatcagaaccaactggatcatgcatgagtaccatctgctagacggggattgcgtcgctggcggtagcagcaacttgactagctcgagctctaacaggaggtctcataggaagagaggccactcaagcatggtaagtgatgcatatcctctctatcttgctgctcgatcagcagtcaacagttcagtaaattgcgtataaggagtaactggagcacaaaatactaaaatttatgcatgatcattacaggagtccaacaactgggtgctgtgccgagtgttcgaatcgagctgcggttcacaagtgagcttccacggtgagggcaccgagctttcatgcttagatgaggtgtttttgtcactagatgactacgatgaagtaagtttgccgaataaatagaaatatagaacctagctaagtcagtactcgttagagctgacagtaggtcctatgcctatcaaaccatttgattagctatggccgggttatgttgatgatatctatacataatctgttgcattatgaataattaaatggtctgggaggcattgaacccaatccagtccatcctagataattaccatgtaattagttatcccccaacgagtatgttgggcttgtgtcagacaactgtggcatatgtgtgaagcacaagtcgcttctaaaaagatgagtttttttttctcgtttctcgcatatggtggtctactttggctcatgaagcattcaaaattttaatataatcaaagcatgcacttcatgcagcttgtggtatatacaaatctagaaatataactatttataagcttgtgtagttgcttgctacatcaaactatcttcgcatctgtatggacattgtgttctatcaccacaaagaaaaaaggaaggtgggtggagcttacgcgatcatatggccatctatgctgtcaatggaaatcatgcatgcttgtgtggaaatcgcgctcagatgaactcatcaaacttgccagccccggttatcatgtaggtggaccctgctagagttttcaaccctgattgatctattgcctaatggacggctttaggacattaatagtgggacagtgcctattgagtaactttatactgaaaagtttttgacaaattgagaagtttactcttggaaatgctatgatatatgactaatgcatgtacgagggggagttgttaatttgcccactcatcacttcagatgcatgttattactttttaaaataactaaacagtcatgatgaagtttaatatatatgtaagtgaatggggacacttgacaaaaaaagttcaattaaagttatgttagtggtctatatatgttactcatcttaattacttcctccgtttcagattataagactttctagcattgcccacattcatatagatgttaatgaatctagacatatatgtgcgcctagattcattaatatctatatgaatgtgggcaatgctagaaagtcttataacctgaaacggaggtagtaattgttaaaaaaacaaaaggagctgaatagagagttcaaagttcaaactttggcaattgccagccagataacatatttactatatcccctactgttgtatacatacacaaaatatctcatcgccgaacactgctgccactttgatagtgccaaatatggtgaactaaagtattagcatttgcagaaacaagataagctaacttgttattgttcctacatgcttaagtgtggttaggaaaagaaataacaacatatgaaataagcaagcatagaagcaccagtagtgattaagtagttttaactgaccatatataagaataattgccaaaggcatatacctgaattacaatgagatcaagcattttgtgaattaatatgattcattgtgcttgacctagggaaaagaaacaaaatcatacagctatccatagtgctccaataatcctgaaatgagagcagcaatatgtaaatgacattctttctttatggaaaaagaaaagaggagattgctatcatgttgaatcagtagcatggttcctgaactacatatttaaagtctgtaagcccagcaaacacaattttacatccttaccatcaaagggaattttgaactactaatgcaaggcagtgaacatggtaataaataaagtccatgccaaacttggaagtattgccttgctcactttttcttccaaattattgaacctgcaaacccaaattgagtttaatgaaatagctgacacagcctgatggattacccctggttgtttccatctactagcagatacaaatttacctcctaagtgcttctaatgatgctagaaagccgaatgccaataagcacatcgtctatactactaacatcatttacttcttctaagaggatacatacctaactccccaattgggatactcatgacacttcaaaagctaacaaccctttgaatcctacattaaggttgcatgcatgctaactttgctagtgtgctcactaatgtttacattaacattctctttgtaccagcctatgtaaagaactccacagtaagtacaacacccaaacaatatttatgacatactagagtaaactcacctcagtgtatatactttactgaagtcactccctaataagtttacaaagccaactgaaatggatgcacaaatttttttttttggccaaacttgtacttcagttctccatgatgttttgaaagccatctggctagttgcttcacatgcattagaaagacacgcttggggacttttgaaatgggttagatccatgtagttttcaacaagtacagatgtatgcctaagattgtgacacaacattatctatccatgcgtaagtgcatttgccgacggggccacattcatgcatttagtaccttttttcctaggcattcattatgttagtgatatgcacatcatggccaactagttcacttcaacacatcaacgtaggactgaaacagaaaattcttcttaatatcttgggagcattcattccatgtagatcaacacaaattgcacaaaaaaaccatcttcatatccatgttttttcaattgtttagaatagcagctaagcaatgcaatctagattctagaaaaaaaaatgaaaatctgattgtatgacggagtctcagaaaagagggtccacagcacaaaatatgatcatttgatgttgacctcacaccaatgattgttgtgaaatatgtagaaggaaattgtgattctttaatttgcatctgactagtcaaataaagcatgtaaattcccggatgatagttaactgtaaaattcaaaactaacccatgcaaggttatctgtttcgcatggtgtgaaactgtgaatcaaagaacttggaagttgacacgcaattcacaaatgtcacaatattctgcagagtgtctgagcagagacaaacagaaatacttatgactatacaacaaatgatgtgttatgggatagcattacgtgctccatagcaggcaacaaatgaactggttctatgtgtgagaataacatggagagaccgagagtgtacaaattaattgtatgtataacacatcaattaagtattcaagtatgatgaaccgcaaaacagtgtccaaagcagagttaaatcgggtccatttcatcgaaccctctttcctatctatactatatcgacagacattatactcttcagtattcaactctttaagcttgaaaacaagcataaaaaactactgccaaatcatgacaagagttgagacaaccttatagaaattaattaataaactaatttcacaggcatttatttgggacaatgcgactcctaacatttgacacgaagaaatattgggccaaatgtcatgcacaagcacgcagggctcaaatcaatcaaaagcccataacccaccaatcgattttgttttctcactcggaccggattaacacattctaatcttcgcggcagaattaaccaaaccctaacctctccctcggaaagggaaaccacaaatcccagaacaaaatctccgatctcttatcacctcaacgatccatcagcgacacggattagattccaccccttttggcaggaacaagaaccatcgatctcgtctacgagtaagaaattaatcacgcggccgcatgaggcgggggggcaagataattaaggagatcagcgacctgcattgcgtccggctgagtgtttgcgggaggagagctagagatcacctggcgcatcacgagacgacgccggagcatatcctcccgccggagacgacccggaatcagcggctcgcggccgacgggcgacggcggcggcggcggcggcggcgggtaggggctttggaggcgaagcgagaggggtgagcttgtgattagttcaaaaggttatggggcaatctgcaataacttcacatcgctgcttccttcgctcgccatcgccagtcgacgcgtttctcctgactggaacctctcaccctgccacggaaaacggagcagcgattagcagatgattaattaagtatttgatattttttaaagaaatggattaatataattttttaagcaactttcgtgtagaaattttttaaaaaaacacatcatttagcagtttgaaaaacgtacgcgcagaaaacgagtgagggaagttgggaacgagaggtaacgaatgcagcctaaggctctaacatatttccctctaacttatgtcattgacgtgtgggtgtcagtgactcaaagtcagacggaagtaagtcagaggatcctctctccatttctccttccacaacacgaaaagaaaaccttccccgcatgtttcttgttttttccgcggaaaatttttttcccgcgcatgttttttcttttttttaactgaacaaacttttaactcagatttaaaaattttgaaatcaaaatttgaaatttttcaacttacattcgaaaactttcaaattcatatctgagagtttatacttagatttgaaaacttttaacgtagattttgaaaattttcaggtcaagatttcaaaacttttaactcagatttaaaaactttttaactcatatttgaaaactttcaagtccagatttgaaacttttaaacttaatttgaaaactttcagcccagatttgaaaattttcaaatcaagatttgaaactttcaactcggattcgaaaactttcaactaaatatttgaaactttcaattcaaatttgaaaactttcatcttaaagtttaaaacattcaacttaaattttaaaaacattcaaactcaaaatttaaactttgagctaaaattttaaaaacttttttactcaacatttgcatgtgattaaaaaaattcacgaaaaaaaatcatgtgaaaaaaaataaaaaaatcatgaaaataaaatcatgttcactaaagaaatcacgtgagacccgcaggccgcacgtgtgcgccagcttttctaatggcacactcgcgccctttgtgtgagcggcagaccctcaaagtaaaacacattattttatagaacgtggctatttttacatgtttcaagagcctacggatttaacaaaatttctttttctggtctaatttttatataatacaagctttattgatctcggtcattctgaggatacttctggcctttgcaccatgacagtgcacacagccagcaaactccaacacaaacaaaataagagaaaaaaacagcgtgcaagatcaaggccctacaacccgaagactaggtcgccacccatatgtcggggtaaaaaactccttgatcacttgttccaaatgtaggcaagccgaagtgacaaagtcctgcaatttaggtttctggacaataacctataatctatatcttctataaagttacaactcactaaatttaaagctcaacattcaaccatatcacatcatcattcgctaatgataattacatatcaaacctcatgcaagcatgcaatctataatctattgaattctacaaatcagcatgcaaacatatccaatcatcatccaccatatcatttccacaatatttttacatatctatatatattatttttataatacttaacgtatacttatcaatatattctgcactaaagcattggtatcatttgactattttaagtttagtaccaataaaccctaatatttcattattatttttcttttttacttttagctcgattgttggtaaaaaacatattaaaaatttattagtaattcttgcaacaaagcgtggggaacacggacgaaggcacggagcaccactactacaacgctacctatgcatgaatgtggtctccttgacacccagactcattcaaagacagatcaacaacaaatccgtaaaaccttgttattaagtcgtgacattattcatttaaaagtaaagtaaattgcattgactgtacacgaacttatcatatggatgcaatctagtgtataaacttgtaaatgactcgttttgatggacgaacttgcttggtgtgtattccctccgtcctataatataagggattttggtgggatgggacacatcctagtactacaaatctagacagagagttatccagattcatagtactaggatatgtctcattccaccaaaatcggttatattatggaacggagggagtacaaaacaaggctataaaaggcacggtgtagctaaccttactaggtcagatattgattaaacatgatgtgtccatgtgaggaggacatgagacatgctatctttgcaaacaacgatgtactttgtttctaaatttatctttatccttctttgttctatccttcttttatatacatgcttatgttacatcctaatcaacaagattggtcatatagtacctttttatccttgggcactcgccgtacaagttggtgcaccaaaacgagcgcttattagtttatacaattttgctatatatttgtcgacaaattttctccaaaaaatttgacagatgtaattatagtataatcgtagtataattacactgtaacttgcatgtaattacactgtaactataatgtaacttgtacgtaactttcaaaaatttatctataacatgttatttcggtaaaatgaaggtcgtgggaacaaatcatttcacatatgtgtgtgctgtgatttttttcttcctcaccataacaaatcttgtaatagatctaacgattcaaaatttcatgaaacttacatacaagtgtaaagttacactgtagttacatgtaagttacagtgtaattacactacgattgtactataattatatctgtcaaatttttaggagaaaatttatcgacaaatgtataggtggttccagtttatatgtactacattatatgcacttgacacaagtcggataccgtcaattcaatttactttattaaaatttatctggacaccagaattaacttccctttagaaagcaaacgttgaaccaaactgtttagtagatagagctgggccagggtagatttaactctagccggacaggcattttaggcccggttacgtttctctcactccagttaagctgggcctaatcctactaaaaaagtaaataaataaataaataagtaaataaataaaaataagaataaaaagcttcctttttatcaataattgacaaaagagaaattttacggtccttaaaaaataataagaggtacttcctccgtttcacattataataatttctagcattgtccacattcatatatatatatatatatatatatatatgtatgtatgttaatgaatttatacatatatgtgtgtctaaattcattaacatctatatgaatatgagcaatgctagaaagtcttataacctgaaacggaggtagtaccaaatttttagttcaaatttgatatctcctcgtaccgaagataccaagagatatcaaattttacactggaaaatatagtacctcgtcaaggatcgtaaaatcgcacttgacaaaaacaaattaaacagccagcccctacattctctttgcggtaactggtaaattctccatctatcctacttgtcactcactcagtcagtcactctgcacttcagccgtagtgacaaagcccaaaggcaatggcatgcagaacaagccaaagaactgaaaaatttccgtctgaaattctgaaccttgaaattgtgtttgtttggaagcacctcaacgtggccattccttcatcacaagagagatcatgcaagaatgtctgcagactctgtccatggctccatgttgctgtctgggccttgaagcatgaagagggaacagccaccatcaatggcctcccgacagtcagcatcctacacatatctttggtggctagggccatttaattttcatgagttaatttcttgatgcaaattaagcagccaagcaaggacacacacaaaaaatgcagccaaatgcatatgccagtgaattaatatcgactatagatagatattcagcaggaaagattgaaagaatcggttaacctgctgaattttcatgtcctttctttgtctgaaaaaaggtttcatgtcctaacgcacactttggtctgcttttgtatgtggaaactaactgaatttttctttctcttacacaattatttcatctatggctctttgcttgatctgtcgctgttgatgcacatgaaaatgttggtgcatccattgaggctgcaagctgagctgattgctgtgggtggttgcacttggggttgggcctagcaggaacagtgcacctaagcaccatttttggaaaatggcaagctcaggccatagctcctcaatgagggcaggcaaatgaccaaatcatggcaaggggagggaccttttgatgaggtgatggagatggcgatgggaggagcaaagaaagagaggaggaggtttaagtggtgttctgagacaaggcaatccacattccatagccccggtacctggcgtggcaccgtgtcatcccccattgtctgcccatcgtacacgctacaaagtttatttttcatggaccatcggctacatgagtcctagaagattctaaaaatttaactagatttctataaaatcatatctgaaaattatgatggtatatatctttttgctgatgttcctttttagtattctttagctccatcttttgcttgttcagctgaaaccaaaatttgaattgtgaaacttaattttagggttgaggtttttttattgtagttcattttctagtattagctttcaaatcgataagaacacacctattaattatttttagttatgttgttcatttttttttcacggctgataagccgtgataattgtgctggtgttttttctgaattttatataattttagtatttttcttggtggggttagatcaattatgttgacttgatggaagtggacaagtggtaaaaggaaaaggagcatgagtggagtaaagtaaaagagggaactgcaatcttgtagtgatagaagagaaaacagggttttcaatatgttttttcctctatggcaataaggttttatcaattctaatttgcctccaaagttgaagttgtgatattcatgcttttgactttgatccaaattattttagaaatataaatttgtgaaacaaagaaatttcaacttcattcaggtttcaaatgaagcaaacctttcggcgaataaaaaccatataaactaaagcaacaattgagacgagtgacaaatccttaatctgaaaaaaaaggagaatgttctttcatcaattaaaaagaatatattaatcacgcacatcatcccgggagatatgaagaagagatagatccagtttgtccagatagtgtttttttttcatcttcttcgaaatatctaatcaatcactgaagcttatctgaacagttcataagtggatagtcatacaggggactgtccactgaagtgcatgtcactggagatggaattagaatccttcacatgatcacatccagacctggaccttactatacacaaaattctctgcaatgctgtttgatcagtcgatctgtttggaatctctcatcacaccaaacatgttctgctactcttgcttgcactagctggactggatctctcttgtttgttcctgcactagatcacagacatatccaatatgcttcccttttgttaaagaaaaacaaaaaataaaactgtggcacaaagttgaccagcaatcattttcagaggaattattcgatgggggtgagtgaatctttgccttatgtcagctatggaataatacttctggattgtgtccagacatttctcttttgtgaaggcaacagctaatagaatacaggagctttatagttttctgagatgctaatttgttaatagtgccatgcccactaacacaggtttgacaaaagggcatttttctcagaatgttttaatttgtgtgcccttttgtagttgtttgttccattttgacaccgtaccgtacacagccaatattaattgtgtgtccagcattgtaatgcttcatcacagttcacaaaagtatatgtattcggtgtactttgttgcttcattatttaggaaacctattgtacttaatgtgtgcataataaaaggaaattaaatgtctcccagtatttatttttccttggcacattcaaggggctatttggatggcatccccacctatctaaaaacaaatgagaaagtatggcatgtcacacattttgtggctcacactttattggtcacaattgtaacaagttatgacaaaaaaaaatgtgtgcataactagtaggctagctggctaaaaaagtatggcatgaacatatatggtattagcccagactttttttttgctatattgtgaaaattaggaacaaagatactgatatttagggaggggggagatagccaataagatatcgaggtttgactgtgctcatcctaaatcatctatttgtaaacacagagagtataatgttagagcggataaatatgtaactaaaaaattcaaataaatgtgattctaattttggatatgcttgaggtttatgatatcttatggtacgacccctccctctttagaagaaaatctacttttatatctaaacttcaatgttgatacaggtatccttcacacgcgtatattaatatactatgttttaatattcacaacttttaaaaatggtatattgaagcaaggtgccaaggtatacaggtttattgattctccagaatattgcatgctgaattaattgttctatgtatagtgagttcatgtgtaaacacttcaactgtataaatcatatgtgatatgttctttatcatgtgaaaatcatctagtggaaagccaaataaatggctacgacgtacttagctgtatccttgtaccaagccaagccactaacaatttgactacttgacatcgctcgtcaataccaatagatttatgcatctttcttactacatataatactatatggaacatcacaaattcatatgaacattcaagctatttgaatgattgaaatattggtgtttgcttcgtagatccataatcacaatataagcattaaaaaacaagtaattgcgtgccttgcaaaatttgaaatactatcacaacaaacactccaagctttgatatgctttttaacaaactatatcgtatctactctgagattagtatagaccacttttcgcatagtagcgatagctttagtgcatcttcatcaaaatccaacctaccaaccttgtaagcattgcttgtcacatagtacttttagctttgccttatctttcttaattataaccatacacaaaacatcacgaacatcttgatcacacaaactaatagtgcgttgttgtttataatcccagcaaatatgtagactatataacaaatatgtagaagtccccaattctcatgagactatataatcctagcggaagattactcatcggcattgtacgtttaggtaggtttacctcatttttcttataatcgtacatgaaacatcacgaattcacatgaagattttggccacacaaactgatagtttgttgtcgtttactagacaacccataatcgtaacaagcataataaaaaccataacatgcttaactataccttctaacaaactccacacaatcaacgccatgattacattgcacttgtcgtatgctatctagaattaccatacatggcctcccctcataattgtggggtgatattctagacttttcgagtactcacaagacctatagtcctagacaagggatgagagagagacgagggtataagagaacatcgtgagaatgcgcatgaacaatttatagtacgaacccatggtatgttaccgtttaccatccaagcaaccatgatcttaattaacatgcacaataaaaaacatgtgaataatgcacactttacaaatccgaaacaccagctagcgcaacaaccaccgcatgcttagttgtaccttctaacaaacgccacaccatcgactacatggctacttggcatcgcttgtcatacactatccgcatttacctctcacatgtgtctcgccactcggtctgactcccccccccccccacacacacacacagtcgccacggcgagcgctatcctggacttccccggtccgcgcgggactatataatcctcgacggaggaggggaagaggaaagggaaggtatcggggtatcatccaaagtgggggcatatgtggagaggcagtgtgagtccctctttccctgtcatctctcccctactaggcccatttgccctctcccccctccatccatccatccattcatccatatctcccttccttttgccgtccctttttcttgatttgattcttcttcctcccatggtctctcctcttctctccccttccttacactaacagagagctcttcttcttcttcttcttcttcttcttcttcttcttcttcttcttcttcttcttcttcctctcagctagccgtgctccggctgcgtgagatgtaagacgacgcgcgaatcaaaaatctcaaaatctcaagaagccaagaacagcagcagcaagtagaaggaaaaaggaggagagaattaagagggaatccaagaacagtggtaattaacgctttaccaatctctctctctttttctctcttaaattatttctctcctggattctttggtttgccttgtttgacggtagattagaatcgtgttgtttttcattttcatttttatgtttattagcgtcgaatgattgcagtcttcgtcaatcaggtgggccgacacaaccgacttgctgttcgtgtctctgtttctttccttcttcttcttttttttctgttctaagtatttttcaaaaaaacaaaacaaaaaaaaataaaaacagagagagttttgtcttggttcttggctggtttgcatcatgttgattgggaaagcaaaaatctctctttcgaagccccccatctgccctactgttgctgctgctgttactactactgcctccatcagccgtcggctgcagtcgccgaccggtgggccccactcgtccactttgttgcaaaatctctgtgtctttattgtttcttctggtcgcgatcagagggaggagagaattaattaattaattaattaattaaaggggaaagaaaatcatggatgttatgattggagattggatggttggcttgtgacggcgcatgtacactgtagtcgtatctctctggtagcaccacgtacaattaattagttaattaattgcatagagttttttttttgttcatttttgtttgcttgttttgggaagcctttgattgatgtagcagtagcagtagtatagtactgtagttaccgtgccacacgctgctgataggaggaaggggggcgcgtggcctatctggaccgtcggatggagatcggacggaagggagtgctccacgtggcatcgagattccaatcggggaggcgccgccgcccgccgcacctgcggaaagcggattccctttttgggaaagcgtaaagcgcgcgtggctggctgcctggcctcctctcgcgcagcggattgggcccgcctgtcggtgacaggtgccccaccgggccacgtggctggctgaccaccagtggtagttgactactccgcaattaactactcctacctggataaaaggcaattatgtgccaatcagaaattcagaaatgtgaattcctcttaccagttgacttgagaccatgtggattaccaaggcaaagatgatttggtctatcaccctgctgattaatctaccctccgttcaaaaaaaaaatcaaaccctatatttaaatttggacatatttgattttttttacagagtagtaggttaggtttaggtcttaggacatctctgtgattagtgattaatccccaattgtttcaagtacttgcttgcctatttgtaagtaactttatactctctgtttgtttcagaaaaacaacaaaaaaaaaggaacatttcacattagtatcttcatacaaaatcgttcacctaactacaaactatatacaatagtgaaccgatgacctttctcgcacttaaaaatcttgaacaagattacttgttttgttaaaaaaaactattcccttcatcatgtggatatagtaatctacaactgaaatggatgttttataatagatgtatcccatccgattctagattgttatattctgagacagagcgagtaaatctgatcattttgcatttaacttttcacgattatttgctctttaaactccatattgttcaaaactgggcaatgctccatctattttaaaatacaagacataactatccttagtccaaagaccaaaaaccaattattatcatttttcttgttcatatcatcataataaatacaatacatgcacccaataaaattagagatattgagaataaatgatttaaataataacatttaacttaaagttgccattttcgtattcaaacacgtgctactaactgacaggtgggccctaaccgcggcatgcaacgctggaaaaataagacctaatcaaccgaattttttatttatattaattaataagtcttgaattaaataagtggtaaatcttaaattgaatttgtaaaaataggatggacgttgtttcaaagggcgtccagatttggacgctgttccaagaagtgtccagaggtggacgctgtaccgaagcacgtccaggctcggtttggggcgcccatgccgccatgcggagaggcgccatcgtcgactctcctctcctcaggcccaatgttggtgcagggctcgggcaaggtgctgccatgcccgccgttcacctcgactctgggagactgcaacagccgccttccggcttccgtctccacaatgtcaggaatctgccattgcagttcacctcaactcacctcgaaggctctcgaatccggagaggacgccgccgctttttgccttcacaccgggaggtcgcagccgctatccacgttctggttgagtcatgctggaacaataacccactcgtgccggcttgtgttgcgtcgtctgtccgcccctcttggttcctaacagcaagtccaggcatcgcctcactccaggtggctggccgagcaagtatgctcagttcatagattttggtattcaggtgtatatgttctgcaatagaaagtttacaaagaatgcaaaattacgaagggtaggacgcaaacatcctccttctatcagatcatctgtcgcccgatgacttccaatctctggcttgttgcaaaaggaaaaaaagcatcgatcgaaaacctcgcatgcagttcatctggcggccgcttctcaagattcagtcagcagagagctcgatgcgtagtaaacaatggaccagaacaaaaaccaaactaatcaaatatctcaaaataaaagtggtggctgttcacatatgaccccgagtagagtgtccgtcatgcggaacagcggaagcattgaaggagagccgggggatggcgaccctgtctggcagatcaggtagagagcggtgcctactcggcaagcaagcaatcaacaagagacaatagtctgcataggagtaacgaggcagagttcgaccattgtgtgattggatccaaagtccaatcttagtccggtgaattggacggctctgtggggtcttcaactgcagcattatggacgcccttgtaagaagcgtccccatctggacgttgtctacaacagcatccacacctggacgtcctatgcaatagtgtccttcctattttcgtaaaaattgactttgctttattatatatttaatttctgcattattaattattatgaataaaaaattcggcctaatcaacatcacaacaagaacctctgaaataaaaaaaacacagtaataacaggtataagtaacaaaccacaacgaaccctaataagttcagataatagaaaaggtcttctcaagattcagtcatggcgatcgccgcaagcagggccaacgccaacgccaaccgaagccgccaccatcatcaaccgaggcggtgggaaaaaaattcctcccaatgctggcacgcacgcgcactcgctcgagaatccggcgggtgggactgaaaaaacaaaacaaaaaaaagcagatcgattttgtcatctgcggcgcaaagcgggtgtgcatttcttttcttttatccccacatccagtcaccgtgacgtggttcttgattcctcaggccgggcgattattctagctctagttgggatgattggattggatccccagccagcagcagcaagcaattcttggccatcggttgtgggtggctgttgattcatgcatcacgagcactcaataaagtatgcagatctgtgcgcccctctctgatttgttcatccaggcaaaagagtatcttgcttctgtgaggtgaggtgattgattgattgatcaatgggggtggattgctttcagggagatgtgtatatgttgtgtttgcagtagcccatggtttcttggcaattgttagttttctgatcacagtggttcaagttggttgcctttttttatggttataagcgatgtgctctgaacttctgatccagatttcgatccagttctgcctgcgattcttgagtttttatgtgttccatgtcagtgtctgaatttttgacaggcagttttcagggtgagcaggtgcgttcaggtttcaggtatcgttgtacagaaattgactcgaaactgctcatgactttttcaggatactaaagcgtgaagtgttgggggttagcttttgattgaagccatcgaaaattttccagtgaactttcaggccctgctgaaagaagaatctactgaaaggttggtctaatctactctctaaagtaatttagatcttctttatgaggagcccatcattggtccggtgatgattttaagatcgaagtttctaccctcatgattggaaactatcacagatggttcacaagacgaaactgtgtacttctgtttgcttatatatatctgcatacctcgcatcatgacagtgctggttttcaactcgtaattctttcagagggaagattcgtaaccttggaagatatgctgccttactttgatccggagtatgagaacttcagtcagcgcatcaaccctcctaggtggatctctaatttaaacatctaaattccagagctcctcatatcattatcctgtttcatttcaggctattgtcggaagctccgctactttctgtagctaacaagctgataattttctgcagggtatgcattgacaacagcacctgcagcgactgcaccttagtgaaggtaagaactacttactactctctctcaaaacttgactggataatcttactgaacactgcttccaatattcaagaaccgtttcactgattgcttcgagcaccgtctgtttgcgtttggaggtaggtcgacagcatgaacaagaatggcatcctgttggaggtggtgcaagttctgagcgatctcgatctcgccatctcgaaggcgtacatcacctctgatggtggatggttcatggatggtaaggcagcctatgctatgcaattatatcatatatatgcaaactcatgtatggttcgcggacatcaattgccggtttattcatgatgtctgttacaacctgatgcagtgtttcatgtggtggacaagcaagggcagaaggtgactgatgagaagaccattaagcacattgagaaggtttgtaattttttttccacctgaaaattggtcttaaaatttaccacctgaaagttgaaaacctattttatcctctatatcaagctttcagaattatttttggtgcaactgcatcctgatagtgtttggtttgaaagtattggtagtttaggtgaagtattttcgtatctgttcatcatgtcagtatgtgtttcagtttttgaaaaacattttaaaggttttcctttaatgaattacaaatttagaccgcagtactatttttcatgaggtgtttggaatggatagtggagatatggagccaacaattcctttgaaaactttccatgaaatcaagaatttttttgtgactatagatttacactgaagtgtaaattaaagttgaagtgaaaaactgaaaactgaagtggcagtatcaatttggttaaaattgcaggcgttaggcccagacagcaacctgctgggtggcgcgaagggcgggtcgtcgccggtgaggtcggtggggatgcactccatcggcgaccacaccgccatcgagctcaaggggcccgaccggacgggcctcctctccgaggtcttcgccgtgctcgccgagctcggctgcaacgtgctcgccgccgaggtgtggacgcaccgcgcccgcgtcgcctgcgtcgtgtacgtgaacgacgtcgcgtcggggcaggccgtcggcgacccgtgccgcctgtcccggatcgagcaccgcctccgcctcgtcctccgcggccacgccggcggcgacgacggcgacggcgacgacggcccggcgcacgccaacttcttctcctccggcggcgccgggtcgaacacccacgtcgaccggcggctccaccagttgatgcacgccgacgtggacgccgacgacgacgacggcctcgacagccgcgccatcgtgtcgggcgaggccgggaacgcggcggcggcggaggagaggccggtggtgacggtggagcactgcgaggagaaggactactcggtggtgaacgtcaagtgcagggacaggtccaagctgctgttcgacatcgtgtgcacgctcaccgacatgcactacgtcgtctcccacgcctccgtctcctccgacggcatctacggcatccaggtgtgtactctggactctagcatgtcaacagctgctactaccatatcgaagctcctaccacgacaatgctaagaatttcacatgaaataattcgatttgtagaaagaatattcctgcatttcaaaggagctctgcgccgcgactcggtcaacgttgacttttgacattgcaatgaacttccttttttttattttaatattgtcaggagctgtacattcgtcggaaggatgggcgcacgctacagaaggacgaagcagggagggtgatcaagtgccttgaagcggccatctccagaagagtatctgaggtctgaaccttctttgccactgtctgtacaagcaactagcatcactgcatcagtagaagtagtaactgttagtagtattttgcaaaagaatttctgagcttggctgcatctggaacaagggattaatcaggacatgttgcagattatggtgtatagttctcctagtagtaaagtcacattgattgatcgatacactcacactgaactctgttactagtatgtcggttttgctacagcacctggtaccacattaatctgttcatttttttcagtacactgtttcagttcatcatttagttctattaaccagtagtaacatactgcccttctacctgtcttttctccattttcatatatacctttgactgaattctgattctatttctgaaaaagaaaaaagataaaagtcagattgagttacatgcaccgaccagtacaatagctcgaacaccgagaagcaaatcctctgacttaactacacatgcatacacatacaattgagtcactgacatgtgagttccactttgatatggcgttaagtcagaggatctctttcagctcgaactggagcttgaatatgtgctaacactggtggttgatgatgcagggattcaccctggagctgtgcggcagggacagggtcgggctgctgtccgacgtgacgcgggtgctcagggagcacggcctgacggtgacgagggccgacgtcacgacggtcggcggccaggccatcaacgtcttctacgtccgcgacgcctccggcgagccggtggacatgaagaccatcgagggcctccgcgtccaggtcggccacaccgtcatgctcaacgtcaagaaggtgccctcctccccctcctcctcctccgccgccgccgccgccgccgccaacggcaagtcgccggggcagcctgcctccggcgccctgtccaggaccagcttcttctccttcggcaacctcttcgccaagctcagagcatgatataattcacctgaatctctgaagaattatggtccctttttcgggttgcgcaaatcgccataaggagaaggagatttcagttgaaattttagagtttagggggtgagggtgagaaactgcgtgtggcatatggcagaaaaagaaattgctgttgttgtatagtccataaaccataaggagctctacctaccagtgtaggaaatgagaaaaaaatgctggatccatggtgttggttctgttctgtgcaatgcagattgcagaatgcagactgctcttgagttgcatgaatgagctttttgagctatctgttcatcttttgtacagcatctttctagcagaagctcaaagaaatttcagtagatcactctttttggagtttgacagcattcatctggcaggtcagcaatcagggatgtcaatatgagatagaagatctttagagcagaggatggtgacagtaggcagacgataggatcaaaagttgatttttcatgtcagagttttacatgtgattttaaaatcagagagaaatggacttccagttacacttgttcttgctttctttcttttgacaactcccaaaccaaacaattacataaacaccacacaattcgataaaatctatatcaaaaaccaagaaagaatctactgttcatggacagaaaaagaacgattttgagctaatggcctgatcaccagtgctgcagtagaatctacaatgcacacccagacaaattatggtgatgcatgatccccaactgttcagaagcacataatctggaaagattcagggatctcttaaatagttgcaacctctctgctactttaccactcatttgcgtggttcaaagtcatcgtcaacatcatatgctgggttgcataagcatctgaataacctgccaattccctgaaccacaaaacatgggaactaatattagcaggcacttgattatgcaatgctttgctatgcaacataaaagctgcttagtttagtaattgcctgagtaactgcaggagtccgataaggcactgtccgagccacgtcgtcatctgaactttcatcagagctgctgtcatcatcgagaatggtcggttttgatggtcctggcaatgcctccttgtccctctgtttgtagtccaattgaattaatatggtatttgcaaattatgataaaataaatctcatgtagcggtatgaattatcctaatgaaaaggccaagtaacatatacctggaatatcttcccaagaattttcagtgccattgcacgagccttgagatcctctttcttgacattgttttcatgcaacacctaacaagtacaagagaatcaattcaatttaatgtactaatcattttgacatgttaacctggaagataagacaggcatgtcgtgctacttggcgatcgcagttcagatactaccaactaactattaatcatatcactgcaaatttctatgatatcttgaggcataccatttcacaaacgtgtagaagggtcacttcaatatcaacaatattcagcttccacagtgagctcatcatcaggtctttgttcatcctcatctgcagatcgacatccctctcggtggccaagccgtccttaccgctctgccggcaggcctcctcttgcagctgcagcaactgcaaggctcctgcattgttctttttgtcctctaatcagtcagcaattttaatgaatacacaccaaaagccccggtttgcgagattttcacctttcgccgcggtgatctgtgacctccataggtgacccttgttcctcacccactctgccaggaatgggactccaaggtacatggccttcttgccaagctcctttgcagcttgccgggagtacacatatccaattgtgcgaagaatgtctagtccagatgctgagcaatggcatttcagaacagttaaaagaagcttttcttagattggcatagagatcgaaatgaattgcggggatcgatcagactgacaagtgctggacagcctcttggcctcggattcggcacggcttgcgaatccttcctggtcaccacgaacgtattgcgagaggaactccttgaggaatcttgctagcttctcttctctttccctttgcacaccctttgtcacaataaacatagaacagaatggttagtatcaactagtctagtgccaacattccatcagaaaggagagaaaaatcaaactggctttggagcatccataatcacagatggctgcaatggctattgagctcactgaccttgagcctgtcctgaagcttttcagggttgtcattgtcgctggccatctcggaggaagccattgttgccattgcaaggtggccaatgtagtcctcaaacagctcactcccgaaaagaagggtgaacaccacagtgccatccagcatgttctccctgaaaaaacaaacaaaacaaaacaaaacaaaacatttgttaacctgaaacttgaattgccacagactgcagagagtcaatcaatcatctcagatgggtttgtttggctacttggaaatgctggtcttgccatagccatcgtaggccttcctctgaagaggatcactcagcacctggtaggcctctccgagagcctgcaaaaaatccacccaagaaagctcagctggtcagacaaagcaaactgaatttaattaaaaaaaaaccatccaagcaagaaaccaacttgagctgagtagcaggaaacaacctggaatttctcggcggcttgcggatcattggggttcttgtcaggatgcacctgcctcgcctggacatcaagaaaccaaaaaccgaaaaaaaaaaacaaatcagcaccgactctccgagcagagttggcataacaagcaagaagcaagaccttgatgtagtaggccttgcggatctcgtcgtcggaggcggcggggcagacgccgagcacgtcgtagaactcggtctccttcgccatgaccgccgccgccgccgatgctgctccctaccccaagaacaccctcccgcaccaagaacaacaacaacaacaagaagaagaagaagaagaagctgggacaggatgaagcagacagagcatggatggggaactggaaagtgcaggtctggcgatcgatctgggcggggggagggagaaaaggcgcatcattcattcataccgcagtggagaggggccagagcagaggggggccatctttccagtgaggacgcgcaagcgcagcggcagcagctgggcggcgaggcgatgctggtgagggaaggtggtggcggacatggcgagctaaacaaatggcgcaaatgcgccgcgcggcgcgaggtggcagaacagcacaggtcgcccggttttctttctcttttttttgaaaaaagaaacttatttctccttttgtttttctatatttcctcctccttgggggcaaatgggcagtggaccccggggaatcaaatcaagcatttttaaatggttactactcgtctgctccctccatcccatttcaagtacggttgtgtatttaagcgttcaacattttaccgtacttcttatttgaaatgctttttatgattattattttattgttgttagatgacaaaacatgagtagtgctacctccgtcctaaaatgtagctatttgtagcacagtaccgtgtctcaaaatgaagctatttttctacctacctcctcctctcaaccaatcagaaccattatccttcacctactttttttttcaaccaatcacacaccttctccaatcattctcacctactttcttaatgtccgtaccaaccttaaaaatacctatattttgggacggaggaagtactttatacatgacttaattttttatgtttttaaaataagacagacggtgaaacgttagacatagaaaccagaactacacttagaatagtacgaagtgagtagattattatacccttaccttttggttaaacaggttattaattaatgtttgtgaaagagatgtactatgagtctgtgactgtatgaaactggaaccacagttaagcgtaagtgcctagcccgtagcccacttatagggttatagggtaagcgacctaaggcctcgtttaattccaaactttttcttcaaatttttaacttttctatcacatcaaaactttcctacacacataaatttctaacttttccatcaaattatttcaatttcaaccaaacttttaattttagcgtgaactaaacacaccctaaagggggtttgcggactacctactttctcccctaataccagacccacaacctatatattcaacatctccacttataagtaaaatgagaggaacgtactaaacacatagaactatatagccgggacatgttagtgaatagtgaccatgatagggttatacataaaaggattagctttgagggatggggaaaaaggaatttgaaaatttcggaatataggtgtgttctttttagagaaacttttgaaacaggggttttgtgcaaatttgtagttagctactccatataagataaaatgggagtggctagaatttagctgagaattttcaaaatttccagtaacttatctcgttactttaatgtcaatccaataattatcattcctagtccttttttttcttgtataaaacgttgaaaaacatttatacataagttttacaaaattacatgcaaaattttttacaaaattacatgaaaaatatttaaacatggataaaaataaagtaaatccatatagcaacaaacttacagttaaatagaaataaaaatgcaccttgcatactattataattttagacttatgagtgtgcaatttcaggtgattgaaaatatgcaattttccatgtgcttgaaatctagtaataccccaacaaaatagtgcacacatatatatagtaacataaattggtatttatatagatgtatctttgatttgattcagtcttatgtcaatatatatatactaactcctgcatgttattaatcacttcggtttgagatcccgcagaccttttttaaatgaaaggattgtgccttttgcttttccctttcttctttagagtttgttttttttttttgcgggattctttagagtttgttaatgaatggatgtgcatgattacgacttgtggacttgtggtagccacattgtttatgtaggagcaggtaaaaagcctagtcgttagtaagccatgacattttttgtatttttttcccacaaacttgtaaatgaaccagatcatctttttttaaaaaaaaaaacaaactctgattttttttaaaaaaagaattaatatctggaagtcttggaacaggctaaggggttgggttttggtttagcatgttaggtgccttgttttagggtgtccgggggtgtgttttttctgattgttgggcctctccagtgatacctatgctccagcgttagtctgttcccttaagtcacttgtttttctttgtgttgtgtaagacttctgtgccgttatcttcggctttgtttaaaagccgggtattatgaatgcctgttataaaaaaaagtcttgggggcaaatccaaaaaaaaacttaattattattttaaatattttagaaaaaataagtaccaatattttacaacatccttttgcttcttgtgtttttcatattaaaaataaaaccgacccaagttcagcaaagctagccaccatgaatcacattagcttcctatttcatcagttgtatcatatccttaatttaaccatggcaggaaaaaaaggtatcgtatcctaacaatgttgcatgttttagttactttagtaaaaatgaagtgcaacatgcccaatgaatgcaattgaatatacttcaccttagtttttttttttaatttctgctggagagctaagtgggaatcttccttgatgttgattaactagtgtacactgcagcaaccccctggaccagccaacccctggaaatatgcagacataaaaacccctcaagcacaacacacacaacacacaatgctgcagcactgggcaaagtttgttgggagagaggcaaggcagggaccaaaagggctaagctataaaggttgtgcacatgtgatgggagatggctttacactgcctgggatgatgcatgtcccctccatgtcctgcagggctccatcatttgcatcacatattcacatggccacagggattcgattcgattctattccacgttaattttccatccatgatccatgtagtcattaaagctagggttcttcatttggaagatgtttaaattcagctaattttcactaggtcaaaataggctcaacctaagtgacgcatacccgcacttattttttccatgatagcattgttcttgttaagaaattttgggtttggcccatgaagacctagcccaaatgtatttattgggcccatcaccgaaccttgcatatattggattgcactgtataaagagtggaggggcctactcattgtacagttgattagagcattgattagtaaagagagtctcacccgtaaactttgtgtctccactttcgatagaattacgggactcttttgtactgcttcgtgtaacaggagggctgcgtaatagttctatgtaaagtattgcggtcaagaaaattcgccatagttgccaaaagctatatgagggcatcagtagcctagaacgctataaagattgaccaatcattaatttttttaagaaagagcgggactaatagtcttgttgagtagtatattagtaacaatttgaaggtcataacatttattttgataaagttatattacacaatgtcaaaatttaatcaatcattattatacagttagccgaatcgatattattatcgttgttatatatataactaacggaattgctatcattatttatctttgttatataacttgcttagtgacaaatataggactaactttaaggggtgcaacataaaaaagaaataagacaatgctgccgtagggtggtaattggcctaacattttgacctacaaaatgtaagggttgggtaaaaaggttgagttgaaatttagtatttttttgtgctaaaaatatctaagggttgagatgtgttgtgaaaggatccacgggtcttgacccattaccacccctaggctggtgtctaaaatagaacgaaagcattgtttggatccaaaatcataaatgaatttaatatgaacataccaaataatacaaaataaatcaagaaagtaactcaataaagcatagcgtggtacctcttacaagccaataaacgcgcacaatactaatactttctgtgcacttataataccaaaactaatgttgtatttaagtacaacttaggaaaccgaatgaattaattattgctcacatcgagacaccaacttgtgacgtcgaccaattgatgtcgagccagttgacttgactcattatcttaacgagttaaaagtcgagctgagctgagctaaacgagttaacgagccataagttttttttccccttggccctaactaatgcatctgcagttctgcacgcatctggccatatgcgtgtagtgtgtacccggtgtgtacatggatggataactttgttgtatgtgtgtactagtgtagtacatggatagcctgtatgcgtgtaccggcggtgtacgtcccttgtggccttgaacttgttgaattgccttcatgcttgcgtagttcggtagttggatactaatatatggatcgagatgtatttgatagtgcaatggcaatggacgtgtggtttcaatccaaagattctgagttcaattggcataaaccaaagctaacttatgaagttatgcgtcactataggtggaacagagacccttgtcacgcatagcggggatagctcagttgggagagcgtcagactgaagatctgaaggtcgcgtgttcgatccacgctcaccgcaatgtttttggtacatttttgttttttaaacttgtgcgccgtttaaaattggtttgaaagcctcatccctcatcttttaagaaaataaaatacatctttcaaactatggccccctttacatctttttgtttaacttatatgctgtttaaatttgaaaacctcctgtcgatctctctccattcgaaactctaacgaaacagactggcccgctgcttccgcttgctgttcagtggcattctcctacctctctatctcccttagaaattcagggtaaacctagcttttcgatcagccaacatcgcaagtatccatataatatgcttataacaatttagaaaaacttccttcgggtgtgtagcggccgggatattttattccattttctaaaaatttacaagttctgcaactggtccaagcctccactccacatttctagtcctacagatttacagaacatcagagatcatcctaatgccctcctttttcctatggtatacaatgaatgatgaatcagatcagagtaagccatatatagttacaaatgatctgtcaacaaaaaacatatgcgactccctctctatcttgtgtcagatatcaacacatatcatctacaacaactctgcagatcagatcagacggcctagaatctcttttgaggagccatgctacaagaaactctgcaggtcagaaggcctagaatctctttggagagccatatgggcttggaggtctcggctggctcaactccagccagggatctggaactgcggcgcttcgcctcgactggttctgcaagggattgtttgggtaggctgctgctgataatccaggggagagcgccggatgcgttggtgaagggaggcagctccagtttgattgcttgaactgccgcagcgggcttgagcatggcgacaccggtaaagacatgtttgctctcactgcagttgggctgctgcacgtgcacggccatgttgagaagtaggttacaagatgaacttggaaacaaaggatgggcaggaggtagaatggtatacctggaggtattgtgaggagaaggataggctgtggaaaatccagcgaattcccttgcgcttagtcctgcgataccatgcagaggagcaatgtttctccttgacgaggattctctgtttggctgcaaaaggggaaaaaattgaagacatgacaaggatgtccggacatgggaattacgtcgtgtaatccagtctttaaacctggtttcacgtaattaatttatcaacaacagatatgtaaagcaagcttcctaaaaagaattatgtgcaacacatgaatcagccctactgccccccatcatctgatgcgatgatacaaataaaatggacagtcacaaaggtcttctgatcttgtaaacatctagaaatatataatctactatgtcctgttggtacttcaaaagagtaaaagagctcgacattgactctgaaaaaaacaaatgagcagaaatctcacctttctatgacttgctgcaggggaagaaattccatttctcaactgagtaccattgcatgttggtgctcttacagcctgatggtcatggacaaaagggtgacccagcaacgaagctgcagaaggcctctgtactggatcacgctttaagcacaaacttaggaaatctttcccttctttggaaaaacaatctggaatttctggtatatctttactgtttgcaattttaaatattgctgccacctgcaagaccaagaatctgacatgaggctcaccaactataaaagaagtatcaagagtcctccagttattttcactaaaagaggcagaatagcatctccaagtggaacaaagcattttggtaaatattaaacgaagtagcatacatcttcatacggataccagggatgcttcgcggttgccatctcaataattgtacatccaaggctccatatatcaaccgcaagattatatcctttgttattcattacaacctgcacgttttacatttagttggacaaaccgttcttggtgaagtaaattacataacatatgacacagtgctccaagtgttgtaaacaggaaaccgtatacctcaggagccatccagtatgggcttcctctgaaagagcgtatttcggcgaaagatgtcacctgtttcaacataagcattgaaatgagataaaagagacaaccaaagctcaaaaggaattcattttgttgttgaattgaagaagcccttccatagccatcagagacatcttttttaaatcatgtagaaatgacatcaccagcccacaacataaagggaagtttatagacatagtacagatctttatcactcccaagtctcaaacttagaggaagccagtgtttatgctcaatgttaaagacattttactgagttgcatctagcattctgtcagaggaggaacttaatactccctccgtacttgtaaaggaagtcgtttaggacagcgacacggtctccaaaatacaattttgacttcttgtttctataaaaatatttattgaaaagtgatatatgtatacttttatgaaagtatttttcaagacaaatctatacatataatttttatattttcaaactcaacaacttgagagttattcatgatttatatttccaaggtttgacttaaacattgtcctaaacgacttcctttacgagtatggagagagtattcagttagatgactactaaatgctttctgtggtctcagtgaggttttaatgatgcttctacacaaccaaacaagcaaaaccccgggaagaacgaaaatataactgcatacatgtttagccatgccaaagtccgcaagtttgacttcaccattagggcccacaagtatgtttgctcctttaatgtctctgtccacaaaaataaaatttacaaagtgatcattgtattcagtgcctaccatgaaaatcactaacagtgtaggataatttacattacctgtgtacagtattcctaccatgcaagtaggcaagccctgaaagaatctgccgagtataattacgaatcacaggttccttaaatggaccgtactctctaagtaatttatgaattgaacctccagaaacatattccagatagatggacagagcttcatcagcctgctcaaaattgtttaaattaggcaagccaaagcttaatgagaactttcagaaaataagtgaacaatcacacaaaattagtaaaactgatggtgtctcctttcttggtggaaactggaaccagggcgtataccctctgattttagaaaagaggaaaaggacaaagcatgcacgattaagcattagaaccaaaattgatgcataaatttatgctctgtgcaccagagagtgagtctatgcatcatcagattagttcccaccaaaaaaaatgttataattttccctcacagatccatcttgtaatgagcaacgcacaatacaaatatgctaagatgagaaagaataaaattatgtggctgcatgacatgcttattgaacaattagtcaataatcatattgaacctaccagttcacttccataatattgcacgatattttggtgcgagagctgcttaagcatatctatttcctgtcattacaagatggacaagttaataaaccaaaacaggatgtagtcagagacaggttggaaaagtgtttgtgttacaataaaaataaattgttcaaaatgacacacagcctatcaattgtatagggcaatcaaatgacctgattcaattgcctaaggcgttcctttgaatgtgaatcgtccaaaaaaacctgcacctccttgattgcacaaaactgcccattttcactgtacaacgccaattaagatcaatcacaagatggcaacaataagagtcaagagtgaaatagattcatagaaatagttctaagattttctttcatgctctcatgtgatgccaaaaaagtgtgttgtgtagcaacttttgtttaaggaaattaaatagaaccatgtatacatgtgataattatgacttcacataccccctctcctcctttttctatgttctagcctaccgaattgaacatgtgggtccacataaatatcaaacttttgtgcatgtacgtaatcaaattacacatagcaacattttgggtatacagccttagacagaaaaacaaaggatttagctgcgatctagccatagaactaaaattctatataaacttcaaagatgaacctgcatggatgcaaagtacatgaaaaaatgagtcacattcatagtaacttctttgggtgaacttcgaaaccatattattcttttaatgttctataagataaacctccatacctgttgaaaccaagataaacctgaccaaatgtgccgctacctaatagcttcccccttttccactgtgattggaattgactagaagtaatggaagatgaaggaatggatgagctagcaacaggaactggagggagaggcaagggttgagatggactcctaggatcatccatccttttcactggtgaccttggggtaaacccaaaatctcttgcgcagcaagcagaataagcatgccctctcggaccaggggaatgacttcttggtcttacagcaaatgtatcctcaggcaacattctgccccgagaataactagattcacttgttgaaggttcaaagatttgcatgtgatgaacttcgttcacatttgcaataggaacctcaaagaatttttgatgctcctggagaataccacatgatacaaaacgcttctcttctaccatgccattatgaccatcaggtagcacagtccttccgctagtgtggacaactggatctgtatacctacagattccaacaacaaacaggaaatatcagaggacttccaggactgtaggaacagattgtcgaaaaacaaaataggtcatctttcaatagaaaacaaaatagagccaaacagggacactatcagaaagggcaaaggcatgaaacacgcactataactacaggcagaaagaaaagaaccatcaatgtgttgaaatttagcttgacgccataaaaagatgcattcttttatgctctggcatcattcttgaaggaacagataatgctactcctagcatagaaacacctcggcgtcatttccatagaatgatcgtgaggaaaacagtagatattctatttatctataagtagccaccgtatttgttctacgccaagaaattcccacgctaatcaaagatgagaaagatttgcgtctccaagtggaacaaagcattcatttccatagaatgattgttaggaatacattagacattctatctatctataagtagccgccatgtttgttctatgcctaaaaaatttccacgttaacgaaagatgagaaagatttgcgctgttttagattacaacggtgcagatttattgataaaggtttacataagacaaacttgttcttatcaaagcaggaatagttgtatatcaaatccaattctatctgggcaaaattgcgcgggaattccacgcaaacaaattacgcgggaaattctgttagttaacaatatcataaatatcctagcataaaatatcttaaatacaattgaatgaataaaaaagaaggatgggttgaacttttgacgcgctttggtagcctgactccccaagtccaccgaattatactagtaataaacaaaggaatacggttttgtacgctataggcggtgagagaagagacgaggtcaacggccgtatggcagttgttgcgaagcctcagtctccacacagtttggtcttttagaagtcaactcaagacccctaaatcacactatcactcggcacacttcgtgattactactaacgaactggaaaaagggtaatcgcgtcgaattcgttgcgatcacggtttggagttgtagcagctacgcccataattggagtacccgaccaaaccgaaacaaaaacaaaaacaaaaatgaaaaaaaaatagcaggtcggtagctgtaaaacggagcagccagtacgaagcaaatcacctgtaattccggtgatccgcctcgtcgtccgacgagctcccgcccgagaccgactcggccgccgacgcgcacgccggcggcgacggcgacggcggcgccgcggcgggggacgccaggggcatcggcgccgacttggacaccggccgcgggagcggcagcccgtggtgctggtcctgtggccccgggcatcgcgggggcacggcgctggcgccggcgccccaccgcgtcggcgtcggcgtggtggaggatggagacgcgcaggcggacgggtacgcggacgttccccccaggtcgacggagtccctcggcgaggtcgccgtggtagaggcggcggcggcgtcccccgcgggcttgtcgcgcctccgcctccacttcctccgcagccaccccagcggcatcccctccgctcgttcctccctattcccgaacgagcctttcccccctcctccgccgccggagcagcagcagcagccgccgccgccgcagccgcacgagacgaggcgcggcgaggcgaagcgcgcgtgaggtggagctggaggagaaggccgctttctttttttttacttccttttttttctttttttttttgttttggttctctcctgctgcttgcgctgccgctaggagaagtactactagtaataaaagcgcgggggtgcgggacagctagctgccttgcctacgtgctgcgtgcgtcgcaacccgcggccaggtgcggcgcgggccccgcggatcggggggtggggcccacgcgacagcgagcggggacgatctcgggtggggcccacgtgacagtgacacgggttgggcgtggcctggacggtgggtatgtgtgtgtgttgggggccgtacggattggcgggttgtggggcccagggggggaatgtgtgtgcgggagagggagagagagaggaatcttcgcgaggcgagccgtgtgcgaggggacgcttggagtttggtggtggagtgggggcccacaaaacagcctaccggtgacgtcgaggggggtgatgacgtactccgtagtggagtactccgatctgttcgtcaaggaaaaggagatgttttggactgatacgagtgctacaaatgttttgcagttttcttttttttctttttaatactatatttaatttcacacaagtacatgcattcctcgtgattatgggcctgttcacttttgatgtcatttttaacattaccaagtttttggtaaagttgtaaaaaaagtggctatatttagtttgctgccaaattttgataactatatcaaatttttggcattggtaaggtttttttttttttcatcaaagtgaacaggccctatgccttccaacgcaagcttactcgtattccctctgtcaaaaaaaatcaacctaaaaagggatgggagacctctcaggacaatgaatctgaacaaaaggtagttcagattcgttgtcctagaaggggtaggttgagctttttgggatggagggaatatgcaagtatttggaccaaagcataaataatactagtatataggtggtgttcttttctcttgaagatgaagattgatttttttacgcaaaacgaggtggtattaacgtttaattgattgagttttaattattacaaacttaaaaaatagattaatatgatattttagagcaactttcatatagaaagtttccgcacgcaacgtaccatttagcagtttgaaaaacgtgccacgaaaatcttaattttcatccaaccttgttggagaaaagaacgggaccatagttagaaattgctatattttaaattagaggtattaagcatcacttgaaagttaaaatggacaccaaggttgtaactctatacacgcacggtttttaagtcactaatttgtactagctttagctggattttcgaaaactttgattagttcatatgaatggtttaaaatcatttttcttctatttaaacactaaatatttccgttgttttaatctgccgatgctttgattgtttttattactgcaccaccttctctacatttttaggggtctaggcaaactctacactacgtgcttaaatattttcttacttgtaaaaatatattttattaaccattaaccttgtaaagtgacaaataaattgtacgagtaaaagtcaatttgcaaaatggtcctaattattattccatcgcatcctcattgacacaaatttctacgtcgtcgtcctatgtggtgtgctagaacaccgcatacagatctagtccataagtacgtactcctatagtatggccctgtttagtaccaaagttttttttcaaacttccaacttttcaatttccatcacatcaaatttttcatacacacataactttgctatcacatcataccaatttcaaccaaactttcaaacttcagtgtgaacttaacacagcctatactccacaaaagattgagcaaagaagagtctaccgtacaggatgtctgatgattagccggagtcatctgaaacgacgacagccgaagattcaacggagagtactacaagaaggatccttcgcagcgaattcagaaagaatggtgcgtagagaggaggtatatagaggttgacaatggactttgagcatgttcttggatgattaatataatagtactgtaatagattatagataatagcttatatagataagttatatattataaattttatggcttcatcacatttggtttttagtttatcagtcacagcgaaaatttgaattaaagcttaattttagagttgattagatattatagatgttaattactttttaaaaaaaattggttaaacttagagaacttttgtttttggagaagattgaaacacctgacaactaatatatgttgaatggaggaagtgtgtgtttcgattggtgcagagtgaatggagaaatttagagaacgtatgggttttcacttatttaataattttcattagatatatcgtaccttttatatgtactcttgctatatgcatttactccctccgtccaagaaacagtttgttcagttttataatgtgtcatattatatattaattaggttaatttattttgaaatggagagagtatgtttagttggatatgccatgcacaatggcgagttgtcgagcgagaatcgtagatgtaaacgctgacgatgctccagtatatagtcgcatgagagggcgacagtcgaagagctaaatagctggctattaagcctagcgtttgctgtcatagtcgatggctagctaccttttcgtttttaacaaacgcaacggtctgactgtgtctgtccgtgcaaggggttgagtcaaagattagggatgattagcttaggcctcaagcaattaattcggttcttaattaactaaggctgtgtttatatctaaaatttggatccaaacttcagtccttttccatcacatcaacctatcatacacacacaacttttcagtcatatcatctctaatttcaaccaaaatctaaactttgcgctgaaataaacagcgcctggtactagtaacaggaacagaaaagacgaaagtactctacacgctacgtacttttgagttttgtctgcctgaaaatttcgtggcatttgagagaagcgcagtttggcggcgtcatcgctgatgtcacgtcaattatctgtactgatgacaactgtgttggttgctctagtcaatttactggtcttaattgcacgtttctttttaacatcattatatttcaggatgaaggtatgtttttctcttccttaactctgaatcgagcttgttgcagacaacgacatacactgatacatcctccgttttattaaagaaaaatccaactttgatataaatatagtctatatctatattcgtaatgagattttctttttaacaaacgaagtatacaatagaaggatagtagtatatgctatatatcagtactaccagtaagtttgatgctaacgtatggtggtagaatggagagtggaagactgaacgagtaaaccggctggaattaattacacacatgtttggaattctcacaaatgaaaaatctcttccctgcaatgaccacaaattttaacaatttaactctttaaaaaaaactatttttaaaaataaaccgttgctaaaacttactccctccatatatttttgatagtcatattttcaaatctgaaaaaattatttttgataggcatatttcaatccaacaacttatcctcttaatgactttctcggatttaatgtgtaactctatattcttccacacaagattggctgcatgggcatcgagaaatgtaaatattaataaatcgcttgtttatgaggaatgactagtaacatgtttaaatggatgataagtagaattaattatccttggtttgtatgaaaaatgaaatatgactatcaaaagtagatggagggagtatttcaaaaatgaccattttgttcagcgccaaatcgtgtagcgctgaacttagatacctcagcgccaaatagcgtggcgctgaatgtgcgttggtacgctgacttagccttccatccatccacggtggcacggcattcagcgtcagttgacgtgacgctgaagtgtctaagtttagcgccagatgatttggcgctgaacaaaagggtcaattttgaaataagttttggcgtcggtttatttgtaaaattagttttttcaaaaggtcaaattgtcaaaatttgtgtgcaatgacaatatgaagtcaacaagcagcgtccatgcatgatctgaacaagccgtacatgggctgattgggctgtagcagagggagggaacggcccgggcgtctggccttgacgaggcggttgccaattgtcaccgcattttggccttttactctgatagtagcatgcacgactctaaacatcttattattttatggtataatatactccatcggttcaaaaaagccaaatatagtactagatgtcccatccggattcgtagtactaggaaatgtcctatctggtcctaggttttaatatattgggatggagtgagtatgtctagattcgttgtattaggatatgtcacattcagtattaaattgaatttttacgtgacagagggagtatgtaggagtggtatttcttctcttgggcttcttatggcatgtaaaagcataggtccagattagttgtagatcccgtcgagggttataagggagacactaaggccttgttcggttacacaaggattcgttccaggccgggaatgataggtataacaagaaatttataatagatacaataagagaccgggatttatttcgggtcgggaaccagtttactcatattaggtacaacaaaacatccagattagttccacacctcttgactagtggattgatttccagtctcttattgtccctatcatgagtaaattggttcccggcccagaatgaatcccggtctctcgttgtatctatcataaatttcttactatacttatcattcccggtccggattaaatccttgtataaccgaacatggcctaaaggaatattttcgcggcactacacattgcaggcaacatgtctcttccaagcatatagcaaatcgactcttcccatgggagcgaacactccaaataaaataaatatcacattttacaaaaatggcagcaacagttggccaagagccaatacgggagagagaaacataaattctacatggttgtggtcccactatagtgttgaagtactctttacacactgcacgtaaactccatctgtctaaaatataagggttaaaattatctcattcatccaaaatcccttatatttttttggacggggagagtatctctcagcctttatttctatgtagacttggttagtaccgttggaggggtttagacaatgaggatgctctaagtttcatatagagttcgttgtcatctgattttatatggaagggtgcgttttattttttttgaaatagtagtgctcatatttctaagggtggttcattaagagaatcgcccatgaaattgtattttttacatgtattttttctaagagaatcgccggtaaaaattaccccatttttacatgtggtcattttcttaacaaaccacctcataaattcatgatttgcacatatggctctttaggaaaaccgcatacgaaattagatatattttcacatgcgattttccttaaggacccacccggaaaataggttttcgtggtttgttaccccaagacggcctcaaacgttttcatagatattattccttttggtctgtcagtgaaaaataataccaagagccacgaaaattattttgtaatagtgtaagatttgcatttcgacgaaatcatgtgcacataactcctctggaaaggaaggtgtttcttttatctagaaccaaaagaaggcccatgtaagtaaggtgttcttttttttctaaaaaaacacacattacaatgtatatttgatcaataaaaaagagcccatgtaaggatgtgagtggtatatacaaaagggcaagctaagcgtgaatttttgcttggacatgtaaggaactaaggaagtgaccgagtgagcatgagaaacgaagaaactaacctaaggctccatgtgtcaatgatttatgacaatccatttttaaaatgaattttgttgttatgcactagtatcatcatatttaaaggattaacatagcaaacatgacatatttgcaatgttacggttggaaaacatagactcttcaaaaaaattctaagtattttacgaaagcaaatacctaaattattcacagctacttttctcatcattgtaataaagaaatttcggccatacgctaccacgcaacatccccggtggcacgcttgcattgcatagcaatgcaatgcacgagagaccaaaaattggtgaacacgtcacccatccctaacggcctcgatctcaccgtccgatctcaaaatccaacggctccggatgcacccacgtcagaagttgtcgatgagcttggcgtacgacgtggtcaccctattcccttccacccgcctgttctcgatctccctctcgacgcacgccgccgccgcctcgccgtcgccggcggcggtggcgcagatgttccggcgagggtcggcgatggggaccctccagtggccgtcggagaagttggccgccctcgcctcggcggcgtcccaccggagcagcgccttctggcgctcgtcgagcaggcagaacccctggagcgccgccggcatggcgtcgtgcgcgcgccaccaccgcgcgtgcgcctcgtcgctggcgaactgcctgagctgcggcgagttccagttgcagtcgtagtcgcggaagcagaaccacggcttcatcccgacgaagtggacggcgagggccacggcgggctccgcggcgagcacggcgcgcctggcggcggcgagccgctcgccggagtccccctcccagaagtgcttcatgaagttggcgtgcgacgggaggcggtgccaccacgagaagacctcgttgaggtacccctggtcgccgccgttgtaggagtcgatgtcggcgatgtggtccatgagcaggcggagcgtgcagccgcacggctccaccaccatcacgccggagttgaacagcgtgccgtggttcgccgtcgcgctcacctcgggcatggcgaagagcggcgacatggggcgctgcaccagcaggtcggcgtcgaggaagacgacgcggtcgtactccgtcagcgaccacagccagaacttgctgtagttccactcgttgtacgcgtccgccgccgcgcgcgggttgcggacgcgccggatcgcgcgcaccttccacccggccgcctccagcgcgccgcggtggcgcgcgctgatcgtctcgtccacgagcgccaccatgtcgcgctccggctccgacggcgccccggaggcggaggccatccggatgctctgcgccgccactagcgcgccgcacgcgtacagctcctccgagtggaggatcgtcgcgtacgcctcccgccgcggcggcggcgccgacgccgccgcgacgtgcggcgccgccagcgcgctgaacggcatggcgagcctgcaggagccgacggggagggcgagatcccggcggagcgcgtcggcgtccggccggtacagccacacgtcgccgtcgcgcggcgccacctcgtccctgcaccggaacaggttcgggatcgggaagcaccggctcgcgctcaccacgagcacgtgcgcggcggcgccgccgcgcccgcgcgtggcggcgaggcgcgccgcggcgagctgcaggtgcagccgggccacgtccttggaccagccacccccgcgccggcacggcagcttcaccgcgacgacgtcgaacacggccacctcctcgccgtcgccgtcggcgtccaccgccggctccggcaggtcggggcacgtcggcgcgtggtacaactcctcctcgtcgatccactccgggtacaggtgctcccacgtcacgttgctcccggcgcgctcgaggcgcgccaccgcggcggccgtctgtggcagcgccgtcctccattgctgcacctcgccgtcgtcgaagttgagcagcgccaccctcgcgccgccgccgtgttccgctccggcgaccagctgcatcgccttggagatctttggccagtccaccgtcacgtccgacacgtacctggtatcatccggctcgtagctcactctcggcactccagctgatgacctgcgcgtttcaagttcagacgaagcaaaggattaatcactgaccatcgtatcaacggcctcatcttttcgtttatgcttaaatttagagttgattttgggatttttttcccatcgtagtttatttttcaacctttgtttttagattattaagaacacgcatataaaaattttattcacaaattatttttcgtttgcaaatgtgttgtttcgttatttcctcttatcagccaaacaatggggctgcaagacggattttatgacccttggcttaaaaaattggtacatttcactacctcctcaacgacattaaaatcattttttcaaagagtaattttataatatttgaggagatacaaagatgtgctacattttattgtgaaatatggtatctcctggtacaagacaccaaacggtactacattttatgttacataatttggtagctttgtggtaatgatcgtaacctttatcttttcaaaagaaatatttgttacaacttattgctttttaaaaaaatcttgcgaataaaaacatgaattttgtatggtttttttttcttactctgtgtggtgatcatcgttgtgatggatagatggcgagttgaggaggctgacgaaggagccacacatgaggatgatgaggacgagcttgacatagagcatcttggggtttgaaccctcagggagcagtgcactgaatggcctgtacttggcatccttctcgtagtggtagcttcctatgtatcccctcttgctcaggctgttgctgaaattaacacgggtaaataatcacaattagttcataatccggttgcgattttcttcagaatattgcataactatttagaccatatgtagaaaacgatagcatgtgcagttgagggcttcaaaagttctaacaaaggtcacaaatcatatggttgaactgaacaagattgccccttgtgaccaaatcattacctgtaactaaaattacttgtcagtctttactaaggtgttggttttttttaaaaaaaacttaggtgttaagttttctttggcttttaccaatatgtgatcagcaatcactatttctgcatttggtcattttctacttttcttcaaacgaccaatttcataacatctcctctattactttcagaccaagaccagaaagtcatatgtgtcatagctttctttctttcttcttgttttttttaaaggaatggctctctttcttcatctcctcttgtaagaagtcatcaagaacagtcagttccatgcttcaacggtccaggcttacatctacaactagtcatcgtctccatcatcgtgccaattccctcttcattatcgctttaatccctaatagctttgttccttattatttttctttttttctacctttgactctattcttacatgaacctatttgttttcaccattctgttaatttcagaacacagttttcttttcttccatccaaattggcaatttggcatgcagattgaagagagacttcttcagaactcgtgacgccattgtgactttttcttcttcagaagttgcaaacggagttggtgaaactgcaggttgctagctatatatgtaacttcctacgacgtgatttactataaattaatcttttattggactgttagctcacctaaaggtaggaattttgattagcagagctcgccaaactttggagaattgggctctcttggttcagagcacacgaaattaggaggattaattcaaattggtttgttgggcacatcacttctggtttctattggtggaaaaaaaaaactacttcagggagtaatttttctctgctaaagtcaccaggatgacgtacttttgtactgtgattggaaaaaactgcaattttgttggtagttaataactactctatgttataaaaatactcgcaaatattgacttcaaaacgaccattttgcattgctaacatacgtggtcatgtaaccttttccatgggctcaggaacatgaccacgaaaacacgctaagaaccgtatttaaacaggattaaaacttgatagcaggtaaacttaagatcatgcatagtatttatcaccaagcgtatcattgtcgatgatgaatatgcaacgatgtaaaacaagtttacatggacaagattaaatactggatagatgcatggatggaattcaaaatgttcggtgctcaaggaatcattggcgccgttatgcatgatgctcgggtgaagataacattaagttttcactgggaacctgagattctaaatatgtaaattttagccaggtttatctagattttagctgtgtttgctaaatatttagcaaaaatatgcagaggaagcaagtttgctataactactggagggaagaaaagactcacagagttctgtcaagacggtgcctcttctctgcatgatgagcacaagcaaaacctctcatccttttatgcaaaaaaaaaacactactccaaattgaatcctagtatgtaatcacccttcttcaggtggcccagctctctgaagaactttgctgataaacctccactttccgtaaactctgaagattgataaatcttcctatcttcctcctatatcaactctggtagctcgatatcgagtcgaaaatttgaactgtttttgagagatagaacagctgaacagcaagaagcaagggagacaacacacttgcagagagggtttatgtacaaagaaagatgagatgtttatcaaggaggttctcaggaggcaatggaatgcatggcttgacagcaaaagatgatgagagctccaaacctaggcaaagagagagagcaacttatagatttggcaggagagctgtgaccagaagaacaaccccttgtttgacaagttcctgcaggaactgttggagacctggtccttgtcactagtttttggaacagatcacattaatttattgttttttaagataaggaagctttattgaacttagccaatttacatcaaggtgatacaaccgtactaagaacactcttaacctctacataactaaaaaagaaaacacaggtattagggaaggatctagtatcaaataaatagaagggggtaaggcttcgaacctaggccggctagcccaccaccttgtggagctagccggaagacccctgagcgtttctcaacctctacataactaagatgcacgcaaccaatcacattaatttaattcacaggatattaatccttggcctgcaaaaaggtgagtgcatatgtagggagcaatcagtcccaaaaatcctactacaaacctaagacacagtcctgtctgaataagggttgttcagttgtttccatttgtcttcctttggtcgcatgcgtgttttcatttcatctcactcactctcttaacattccttttgcttcaggtgtgaccttacttatgttatatgcaaagacagagttggtgtgcaactctgacagagatgtacacaactgaagaacaagcagaactgtactacatactacttctactcaatcattctggatgataattcagtaatgtatgatcaacaagggacattttcttggtacaggtgaatggaagagtagacatgaacagaaaagaaaactaaaagaaacagaggttcttttcctgtacttccaatgtagattggctaccatatacacaagcaggagaagctctgacgttcaccaaacccaactgatcaactgggaagagtttggttggacctgaagcaaaaaaaatgtgcagtgcctttgcacccaagggatgactgaatctgaaattgctttaggtaaactgctaaaatgaagcttacaaagaaggttactacataagcgagtaagtgaatgtggtgaaaaggcagacacaacacagcacagcacacaaaaaccaggacagaaaaaagaaaagaaaagaaaagagaggaggaatcttgatttgactacgattcaaccagtaggcctaatagtttgaaggttacctgcaaccaaagtgagccatccaatgttttaggtgaagcatgaagaatactattccatggaaatctctgaaacaccaactatccagagttattgctctattatgtggccgtgtacatcttcgatgcagagaccggattgaattccattatccaaaaaaaaaaaaaacactactataacagtatagccaccatcaattggcatatgttaattttttttaaggccaaagaaagacaatgttgtgtatgtgtatggtgagtatgaacatgaaaagattatattttgtgggcatgcatgatgttgattaacggaacaggtcttactttgcttccagatggaggtaggcaaaaaaaaaaaaagagttcaaaactcctttgcttcgctttgcttttgcttacctgagggtgcaggaaatcaagagatagctcaggtttttctgcatgcatctgttcccaactgctccctttcctttgacctgtcctcttctccttctctgacgcgcgtgctgctgcttactctgaaatctcttgcctgcagcgacacgtagaagtaaaaggaagggggtttcttgacgtgagaagtggtcagtttgtcaatttgtcaccacggatcagtggatggtcctaactaaccaagaacaagacgtcagaatctggccaagacagtgatatccatctaaccaagggaacacatgttgttatttcccagttccaaacacgctactggagaatcaattaagggcaaacacatgtggattttatatcacagcaactgagaacgtttggtaaccaaggagaattttggtgtcgaataattaagaatacagtgtgagcgtgttaagagctgaacacggggatcttggggttaaaatcgcacacatgcacctatcactatgccaatgaatacatttcacacatggaattttattggatttttcaagtaattcgttttcttcaaaatttctccaacaaaattcctccgttccaaaggaaaagtagaaccctgtttggtgaaacttcagcttatgttggattgttggctgcaatgtctttgtaagcttttcaggaggataaaaagctactccatccgtttctaaatatttgaccgttcgttttattcaaaaacttctgtgaaatatgtaaaactatatgtatacatataaatatgtttaacaatgaatcaaatgataggaaaagaattaataataacttaatttttttaaataaaacgaatgatcaaacatatttaaaaaagttaacggcgtcaaatatttagaaacggagggagtactagctctatcttcctgcctaagggtaactgatgttggtctattgtcgcctagattggaaatttagaataagctccatgtagaaaatgatctttagtctcattttgtactaataactgtaggggtcaacccgtaactgcttgccggatttttcctaagagaaaggacgtcgagaaactgaaaagattcaatggacgcgttctcatcgtcagcgttagctctgtgtgaaaacaataattgatgtcatcagctttaaattagtctatttgatcaaatggatttgctaaaaaggtgtcgctacattttgggactagtcagatcttaacggttcaaatgcccttgattgaacatcgtgtgcacgggccgggcgccttggcctctctctcctgtttttgcttttgtttttttactttatttgttaatctgcatagatagtataactactccctccgtattaaaaaaaaacccaatcttaggatactgatactactacacaattataattattttttagttccatatctcatataacaaagtaattaaagaattacacctattaaaatttgtagtaagtatggtgtaattacaatataactacttacaatttacaacgtaaaaagaaattaaaaaaatgtgatgctaaaaatatactccctccttcctgaaacgagttcatttttagcttatccagtttctcccaaaataagtttatttttaagtagttattaaattgaagtttgtgagagtagaaaataaatgcattgagagtagataaaataagaaataattgcattggaatttgataaataagggataatctattttatctaacatttatttctcatgcaaaatggaggcattatcaaaacctatatgaaaacctccattttgtgtggtacctatatataaaccttttattttcatagttatttatacataaatatataatttatattaacaacaatgaaaatccatagtgtatgagtactcaaacttttataccatatcgaagatcatatatagatgaacaccatgttaccatgactactacatctaattttatttatctcatctacttatagactaagagacaacaacacataaatagttatctctaacatataaatccaaataactctaatactctcataattatattagagtttatatagatcttgtcccttcataatgggtgcattcttctctctctcctcacttctctctttcacttcatcaattggcatcttatggcaagtgattggaggtatatagtaatatgaccgatgatggcctttaaatggcacaaaaaaaacccatagctttggatgcaaaaggctccgttcggctaccttgcggctgggcgggctgcagcagaaaaccagcatgaacttttttttttgtcttttactgctacaacccagtcacagcgttgccgcagactggacccccgaacaaacccaaagttgttcttagtaagaaggtaggagaaaaaaatatttataaccaacactacaagtacgacgtatacgttagcgtcatcatctaatgtgtgttggcctaatatattactttgaaattaaacacaataaataattaattggataagaactagaacaccttgacctaggaggaaaagaaaagatcaaacaaaaagcctattatataaatagctttcaaaaaaacaaagaaactcacgcaatgctgaaggaagaagggaggagaagggcatatgcgtccaaaccggcttaaggctgtgttcgggcatgctggttcccaaccggtaatcatggaaaacggaacagtctattaatgcgtaattaattaagtattagctatttttttgaaatggattaatttaatttttttaaagtaactttcgtatagaagttttttttttttttgcaaaaaacacactattttgccgtttgaaaaacgtacacgcctggaggttgggaaaaatggtgccgaagaccgcctaaattctcttaacgagtagctaggctcacgtgtcagtcccacatggttggcgtgggctccctcttttttcaaaaaaaaataataataaaagggaatcatgggctagatgggcttggcacatgggccatttgtatagctcggcccatctcctgcaaccgggccgggcaaagctagctgagaaaggctcgggttgttgggccaggcctgtcagcctctcgtcggtccgaattaggagaaggaaaccctagctagaggaggatttgcccataaatagtcgaacccctcctgcgatgcctccgccgccgcgacgaatctctccccctctccctcctccgcttcgtggatccgaggatccctctcgttcttacgcttcctgcggtttgattcgatctcgcgtctcgtctggttttgggttcttggggggttttcgattcatcctgcttggctgtttttcttttcctttcaatttgtggatgttgtttttcttggatcgagattcgagatggcgatgatgaggaactagtcatgcaccactctgaactcgggagagatctctctcctgttcttgctgacaagcagacttactacccattatcaatctgagcctgttcatctcattcacctgaagaaacaaaattgctgccttttctgtttcttgttctcttgttcttggatgagcagggacgattgttttcctgttctcctgcattttctgttttgtgcattgtggataaaaataatgggaagaaccaaatgatgtgggtttgccatttggcgatccaaccatgatgcggactgaatatttccttgaggtcaaatctaattgccgctgatggttctttgtcccacaaatcctccattctaaaacagtttctttttggtttcgtttcagtccggtagctgcgtgtaatgtctgaatttatccttttctggtgcatggtataaaactgctaaatacaacctgtgaaataattgcgaactttaatgaataattacagaatagttgtcattgccaaacaattacagaacagttgtcattgccaaaagcagtcatcgcctaaagcagattcgggggatacctcatacctggctactttgccaaatgattcctatcaacgtgaagaacctgcgtgtgaactaggacctctcctggatttaacatgtggactaggacctctcctggatttaattttactagtatttagaacttaggccatgtttagtatcccactattcttaacttttcatcacatcatatcacataaaaaaactttcctacacatgaattttcaactttttttttccaaactcccaatttttttcaaactttcaacttcttttaggaactaaacacatcctttaactgaattttagtatgaatttagcataatacctgaatgttaggacctgaatttgtagtatgagttcagtattttgcaggaattttagtaagaggctgggtgacaattctgacgaattggctgaatgaattgatcgaagcagccagggaaggcttgataagcctggatgacaaatgtctgaactgatttcctgcgcacacacccatttccgacgctttcaaacagaggcacattcctcaattcttgcaaactattcgacaaaacactccggttagacacgaaataaaatggtagaaagagtaatcttggagacgttcatgccaaataataggaattggaaaggataatttacatagaaatattcgaagtcgtaccgagtgtagcacaaaatccattcattgctggcctttctattagggctgatcacctgataaaatttttcaccctcacgtcgaatgtttggacacatgtatggaatattaaatataagttttaaaaaataattaattgtatagattgtgactaatttgcaagacgaattttttaagtctaattgctctatgatttgacaatgtgatgctatattaaatatttgctaatgacggattaattatgtttaataacttcatctaatagtttacaggcggaatatgtaatttgttttgtgattagtttacgtttaatatttcaaatatgtgtcagtatatacgatgtaacacgccaaaattttacacctatgaatctaaacacccccttagtgtgcgtgaagattctgacgccaaagttgttcggcgaccccatcaattgtggtacttaatattgtggttaatattgtggtttatacgaagttctcggtttcaaagcagtaagaaaattttgttcccacataatggttctggtattaacatacaaccattttctcctatgtatttagttctagaaatgtttactactaaagtatttttttgtcttctattgtagttatccttttcatcttttttatataaatagaccacgtttaaaaaatacaaaaatatataaggataataccccacttaattatagagcgaagccatttacttccgccttgcaaataagtggcaaaaaacctatttcgcttgttagtggaagcttggagctatcaaaaaccctaatgagtgaacgttcagtcacatgtgctcggagtgccaattggttgtcctctctttttgacgcacctaaacacctttcctggtatttatttatgcatggaatagatggatgttcgagttcaatccagaggttttcaatctataaactttacataaacttccaatgtataaatgtaatacattgaggaacttttgatttataaactttttttgtacatatgaactttcagtctataagctttatacataaaaagaacttgtcaatatagaaagttgtgcacatgaaatttcaaatgaactaaaaaacgccaaaactttctattcaaaatcattaactttcaacaatctttggaattgtttgctcaaaaatagatttttttttccaaccggatatgtgaacctttctatttcaaatcataaacttctaaccaccactcactagtggcccgacacataattaggggaggaagaaaaatgagattttggccacgcgttgccttgtcagggaggatgaagaaggcccctcatgcacattggagttgtcgccaccagcctaatcatcgcctcactcgtgacctcaaccaagcccaccttgcctcaccattgtacgtaccatctactcctgggaaaataggaacagagtaggagtggagagctcgttggaggaggaaaatagataagggcgtggtttttacttgtggcattaagcaaaggcactataagggtagtggtgctgtgatgccatgggagcgaggggaacatgtgggagaggggataaggtattcgttttgtttgtatgcatgtgaaccatatatgccttcccatatagtcatgtttcaattgagataagtaagagcataaataatggcataagaatgagaataggtgccacatatgattttcatagataaatagaggtgagaggagaattgagattttttctttctaaaaactgttcaataaacctaatagaggaagatgcattgagaaacacacaatatgttctcatcatgtctctccgcttaaccgctcctacgactccatccaatccacattgttattgtcgctgtagctttggcgattcctcaactgtctgctacaacgatgcaccacctaccatcctcttctccaatcgtgccattggcgctagtcgctattcccatgccaccacccacgtcgggagcgctagtcgccgttcacattctcggagacaagagtcacctcgtgtgaggccccgatccggtgacgagtcctgcgggggctagggccggtgcgagattgttctttgtgctggactagggccgagcgagcccgtagaaaagcggggccagggccagggccgcacccggcccgccccattgccaaccctatcacgtggcagcctgccagccttaacacgtagcggtgccatctgccaccgcttttcacctttttctcgcctacaaacaaactcgcaagaggaaaaaaagaccattcgcgtcgcgtgcgtattctttgcttccgctctcgatagatcgcgaggaaaggagtagtacggcggcggcggcggcatcgtcggcggcgatgaggtcggccatgacccgcctgatccgttcctcgtcccccgtagtctcgccctcccgtctcaggtgagcccctccccgcgcgcgcccgccgtcgaaacatcccccaagtttttgggaagagataaacaataaacccttaaattcagatgagatgagatgagatggcgtgcaaaggtgcgcgtgcttcgttaggatggggaattaggagccgcatttacctcctcgttggcttatccaccacaatagggggattttgttatgattattgtggattttattatgatgctaaattagtggtgttctgttctaccttgtgtgaccgatgatgccaacagcgccgcaaacttgttaaagaacaataatgggaaggctttcttgagcgaggatgcttccaagcgtgtggaggagcctttcaaggtggaggaagcagaaaccgtgaaggtgccaccgccttccccggacaaggtaattataattaatgtgattattactagtttgcgtaaaatgcactagtttaagactttttcttgtgtttagcttgtttggcagtcattcttggtagcagtcgttttatccttttcttacccatatattataaggtgcattgttccctttcttttttttttttctgaatgagcaatctatcatagtgggctagtgacctagtgtattcattttaaactatcagcgggatgaattttggtttatgcggttgtatctgatgtagattattgtcatagaatggacatgttggctgttggggagatatccagtgcagccatcagttacgtaactgaaaagttgcaaaatgaattcgataatctcgatgtagtccttcgaactgaaaatgcattagaggaaacataaacgtgctagtttgattcgaatgctaacatattcccttttctttcatctcgcctttcttttgtgctgttttatcggaactatttcattgtcattgctctcaatgttgaaacagttagacttgaaatgttatctacataagccctgtaagttcactacaccgacaatgttattttaccagatcttcagattgatttgatatggaaacctcttttttccctttgtgcagcatattgtgtttttgcattaagcatttcccaaaatatttccctgaatatgtcacggatacatcctgctttatgatatttaaatctctatagtgtgcttatcttcaagggaaagcaattcttcatttccaacagaaaggtcatatataactaaaatattcatgtagacaagtgcttagcctatttccaatgttttcttatcttcattatcctgagcaatatattacagaccgataaaaatattataacaagtattctgttttgaatggtgttcctgcaggtttaacagcaattaatatatttttggaaatgtattgtttaatattaacagctaactacgtgttattcgagcttttagataaattatgtacatttttctatggagttattctttatgctttccatttggtgaagattactgaattgctactgacatatatgtcgacatagcttcttgtgctaggtggaaatggttttgttggttcacatgtttgcaaggaggctttggacaaaggatttactgttgctagtcttaataggtatttctgtaagctgtatctgttgacatgttcattctcattttgttgtcagactgtttgattttgagatatatttttttatttttttttgtaactagccaaaatcataaataaactattgctacagaggctgtatgtctattgaaacttaaacacgtttttgccctgatatctgatatggaagagcaatggatactctgaatcctctaatctaactgtagataactttatatggttctcttaagtttgtgttgatgcctttagctttagaaaaaattcatgggagactctcattctccttttgttcctctattgtggtcactgaacagaactgtgtgaagctgtttctactcatattagatttcgattctagaagtttgttaacaatgtaaaaatataatcagagttagtttgatcttttctttttcatcttattcttctgtgagtgttttcaagggggtgtcaatggtgtattctgagagcaatactcatgtaatttatgaatgtacttattgctgttcagtagctgtagtcttgcattgaatttcctaaatttttattatttttagataattgaagctttattgaattcataatttccttattgacacatctgatgtattatcagacaaacaaatatcagactttatatacttcaaaatcatcaatctttattttcaatcaatgacttaccattctcttgatttttgactttaacagatctggaaagccatcaataagtgaatcttgggctgacaaagttatatggaacaaaggttatttgctagtgagataaatttattgtgcttataaatgattatgttgcttaatgtctcttttattgggcaggcaatctacttgaacctgattccctgaaggatattatggaaggtgtttctgctgtggtatgtttacacttttattttcgaatttgttaacttggtgcacatttttgtactgaaaactgcattcttgcatttatgctttcctcttttttttttttttttacccttgtactttcctggatctttggcaagtctcttgaaagttgaaacagactcacttgtctggtctttacatgatgccgaaacaactgcaggatattgtactaagttaatatatgattctgaaatgatatattgggcacctcaagcatcaaatactaacttattgctaccttctttgttcaaatccttattagtgattgggttggggttagggtttttgttattttgtatgcgcattattatgactgttttctgctgttattgtcatggaaatctaattaaaggtaccattcattagactactagacttgaaactaccaagaggtatctgatgcctttactccatacatgtcggcaccaatgagtatctggtggatctgtacagtcttgtaggttaatatcttttagtttctaaaatccatccttctcaattaatatcatttagtttccaagctccatccgttgcactcccttggctcaaattgctcataactcttggttgatctaggtggaaatggttttttacaggccatctttttaaattgttatcacttaggttttcaaatccatccctgccacttcccttgcctgcagataattttggattattgggtcatactatctaggttctatgagcactggattaattagtatgatggaaatatttccacttcgtgttaaaccttttatcatcatccctggaacaccgttgataccttttaaatttattatgcaccgatactctaataaggtataacatataagtagtaactgctttatgctaacatgaatttatgaatcttgaaacattactcatatgagagaaattgctataggtatcatgtgttggaggctttggctcaaattcttacatgtacaaaattaatggaactgcaaacatcaatgccatcagtgttgcagctgagaaaggtatttatgtttgagaacatattgttgcagcaccatattcattttctatgttatgtttgcagtttctgtcaattcatcaatatgctctttttcacatgtattgatatgattctccccactagtttgtaatctcctttagtcagtatagtgtgtagttcttatgatcagatcaattaaagcaaaagggtaaatgtcagaatactaactcttgtgtcataatttccaaaaaaataaataaatacaatttcttactagtacttcacaaagttatctctggaagaataattatctagaaacatgcactttacttccttgcatattgggcttgtctgtcgtacacaaaaagtggagaggtaccattcagccatgtactgtagcttggactgcttggacagtgacgatgcatgacatctagtcactagagttgcatatactgcccggtgcttgcttaggccgaaggcaggaatcactccaaatctttcatttttgatcaattatttcatatgatatggcaaagtaaaattaagtctatgctgatgcacattatttttggttgggacttaactgcttccacatcatgctctacctgcaggtattaagagatttgtgtatgtgtcagcagcggactttggttttgtgaactacttgttgcaaggttattatgagggcaaggtaagtttttccatgttatgagggcaaggtcatagttccatagtgttgcttgtttttctgaccctataagtaatcgttattgatataaatttgattggtttcatttatcctttgaagagggcaactgaagctgaactgctatcaaaatttacctatggcggtgagttctctttcacatgtaacctttttattttcatgccaatgtgttcttgcccttcttttattgtaagaaattatttctataccttttgaaatcatttttctaaaataaagttacgggggtatccttttctaaatgaaccttcttcctacaccacacaaggtggcatggcaatcgtgtgctgccatgctccacatcattgcgagtggcgtggccaaatctttgcaacaccatgatctcttcccaacatgacagtattgccctgtagcaccagctataacggaattgcaaatagccaaatacattcagatttggaaatgggaggtgtagaggtttatcttgaacttaggtttcaaaaattcgtgatcagtaaccagtatcggacttgatataacaccacatataccatggagtaagcagcaatatggctgtccttaacaaagaaataccagttcagaggctctggcaatggcccctgctcatgcggggcctgtgtttccttgtcctcaactcctaattgtttttactggattcttgctgattgctgctcaaggaccctatgccatgaggtgcatataggctgccaattgtgtggatggttcttgatggtgccattgatactccatctctgcaatcgattttattgtccatcatttcaagtggttgccagtattcatggttcttgttgcagcacacgattccacgataaagaggccaaaccaccaaatttcttcgcaacaagaggacaatggccaatgattgttgcagctaattaactttaaacactcaggtagttgatgcattgccctcaagcacattaggaagcactgttacagcccttccagtggaaagtacaggtccataatgtcaaggcgtaagctagataacttgactgtgcacaccgtaatgggcaactgttgttaggattctaatatcattcggtgcggatctaggggttgaactacctcatggagataaagatgattgacttagggagtgaacggggaaggggagagagagagacataccggcgtcggtctttgagcttgatgcggccatggcgacggtgtggcggcgtcggtgtggacgatggcggtggtggtggtgcggctgtgaggaatccccccacttcaacgccttcccggatcggagggttctagggttttgtggggagtgcgtgtgcgccgtcaaacgtttcttttagtgtgccggccactcccccctttttatttggcactgcgtgagagggaccacagccatcgtacggctggcgccccagatcagggcgtgtgagtgcggagtggggaatcggtttcctgattccccaggagattgcaactaacattctcccctttgatctccgcctttcttacttctcatactcaatattcacttctaaatagattgatgtatagagcacgcttcatcatgacagtcaccactgagccatcagacgcaacaactacaatacctccctatttcgaaataaacactaggcccttttaagccaaggatcataggctttcccgtaagccatggatcctagacttcgtatggctcctttctttatttgtttaacatactttcctttaatacaatcgatgcaatattcggaatccataaagtctaacggatacaaaatttcttctttaattaatcgttcaattatccccttcgaaatgtggcctaaatgacagtgccacaatttcgcagatgtttcgtcattgcatcgtttgcgcttatttcttacattcgtagacggggaagacatactattgcacgcaacattctctccattgcatacaacattctcattctcatgtttaggcaacatataaagctggccttgttatatggcaagacccacacacttattcttgaatataattgaacataattgttgatcgaaaaagcaattatatccatcatccgctaaacatgaaacataaaccaaatttctactcaaaaagggtacatagagaacattgtgcaaatgaagtgtgaagctattattcaattctaatggatgttctccaattgcttcaacttcagcctcgactccatttgccactctaatgcatctttctcctcttgttagcatcctcctcatatggaatcgctgtaatgaatttgcaacatgaatgatcgcacctgaatcaacccaccaagtggattttaaataacttatgtacagtgattcatcttcaaatgtaataatgtcctcacctttctttatgagatgctttaggaaatcagggcaatctttctaatagtgccccttcttcttgcaccacttgcaagtgtccttgtccacttctacattgcttggtcgtggatgtggatcactttgtggtgcctttccttgtgccttaggagaggcaacattctggttgtagttgttcctcttcttgttgtgcttcacatagttggcggaatcaccacgagccttgggtctatcctcttcttgcacacatatggcaatgagcttctcaatgtcccagttttctggctgtgagttgtagttgacaacaaaagcctcaaaatctgaaggcaaggaggcaaaaataaggtgaactagaaacttatcagggagcaccaagtccatcttcttgagctttgaagtgatatcactcatcttcaaaatgtgctctctaacccctctgccagtgtacttcatggttactaagctcttaatgagggtgctggcataggcctttgaagaaccagtaaattgattctccactctctgaaggtactcagtgggtggtacaagctgggattgctccccttattgcctccacaatggagctcttaatcaccatcaagcacttgcggtttgatgactcccacttcgcacgatcaacatcatacttcaatcttattggagcatggtctagcatcctctgtttaaagtcatcttcgctctcaccttctgccctcactagagtaacaggctcaatggggcgaggctcagtgagagctgcatctatgtcggacagcgcaagtgctatctctatcttctctcgccatgagccatagttgttcctgttaaggggctcaacggtcgagatgtaagctagcgggttagtagttcctgaaagcaaattagaggaaattgagctttaatttgctttcaggaactactaacccactagtttacatctcggccgctgagcctcttaacgggaacaactatggctcatgccgagagaagatagagatagcacttgcgctgtagctctcaccgagcctcgccccactgagcttgttactccagtgagggcagaaggtgagagtgaaggtgacttcaaacagaggatgctagaccatgcggcaataagattgaagtcgtgcgaagtgggagtcatcaaaccgcaagtgcttgatggtgattaagagctccattgtggaggcaataaggggagcaatctcagcttgtaccacccactgagtaccttcagagagtggagaatcaatttactggttcttcaaaggcctatgccagcaccctcattaagagcttagtaaccattaaatacactggcagaggggttagagagcacattttgaagatgagtgatatcacttcaaagctcaagaagatggacttggtactccctgataagtttctagttcaccttatttttgcctccttgctttcagattttgaggcttttgttgtcaactacaactcacagctagaaaactgggacattgagaagctcattgccatatgtgtgcaagaagaggatagacccaaggctcgtggtgattccgccaactatgtgaagcacaacaagaagaggaacaactacaaccagaatgctgcctctcctaaggcaccacaaagtgatccacatcacgaccaagcaatgtagaagtggacaaggacacttgcaagtggtgcaagaagaaggggcactatcagaaagattgccctgatttcctaaagcatctcataaagaagggtgaggacattattacatttgaagatgaatccctgtacataagttatttaaaatccacttggtgggttgattcaggtgcgatcattcatgttgcaaattcattacagagattccatacgaggaggatgctaacaagaggagaaagatgcattagagtggcaaatggagttgaggctgaagttgaagcaattggagaacatccattagaattgaataatagcttcacacttcatttacacaatgttctctatgtaccctttttgagtagaaatttggtgctgccatgctccacatcattgcgagtggcgtggccaaatctttgcaacgccatgatctcttcccaacatgacagtattgccctgtagcaccagctataacggaattgcaaatagccaaatacattcagatttggaaatgggaggtgtagaggtttatcttaaacttaagtttcaaaaattcgtgatcagtaaccagtatcggacctgatataacaccacatataccatggagtaagcggcaatatggctgtacttaacaaagaaataccagttcagaggctctggcaatggcccctgctcgtgcggggcctgtgtttccttgtcctcaactcctaattgtttttattggattcttattgattgctgctcaagcaccctatgccatgaggtgcatataggctgccaattgtgtggatagttcttgatggtgccattgatactccatctctgcaatcaattttatactccatcatttcaagtggttgccagtattccatggttcttgttgcagcatagctgacaacacgattccacgataaagaggacaaatcaccaaatttcttcgcaacaagagaacaatggccaatgattgttgcagctaattaactttaaacactcaggtgatgcatcgccctcaagcacattaggaagcaccattacagcccttctagtggaaaggacaggaccataatatcaaggcgtaagctagataacttggctgtgcacaccgcaatgggcaactgtctcatgccttagtgtttctctcatatatattgcaactgtctcatgccttagtgtttctctcatatatattgcttgaagccatgggttgttccagtttgcttgtctataagaaatggaatatacctaattttctctatactgtttttgagaaggtttccagtgctaatcggttatgtgtacatattatatgtccatactaggacatcaatggaaatgtgttagaatattggcttcaaatagccaaacttggagtaaccagtaaaaaccaatttgattttgctaaaattatttctgatgctatgtgcgatgatagccttgaatcagcatgtattgaaatcactatattagtgtgagcaagttcatagctaccactccattactcgtgagccacttatgtccgtcccgtaatataagggattttaggtggatgtgacacatcctagtacaatgaatctggacagacggtctatccagattcatgtgtcacatccacccaaaattccttatattatgggacggagcaagtatttgttggtcttacattgctggaatactttggataactggagtacatatatgagggactgggttctaaaacctttttctcgagttgtcttctaaattcttagggcccttgctccaatcttgttccccctgtgtgaaagcggctggttctgtagtttgagaattctgctgattccaactattccattattattatcatgtaataagagtagaaaaactaaagagaaggcataaccagaagaattgtgactttgtgagaagtttatttatcatttcaatttggattttaattcaatggcacttgagatgactttggacacaattatcctctcaataagtatttctagcccaagttttatatcaattttttacatatttttcaggagtgattttgaggcctggttttattcatggaactcgccgtgtcggtagcgtaaaaatacctcttggacttgttggttctcctatgcaaatggtaaaagtctcttcattctgtttttgcaagccttgcaacacagttatttttgctcttattccaaatgtaaagttgtttttaagacttaatttgaagatctccctgtgcactgcaggttctccaaagtgcgaagccgttgacgagattgccgctggttggcccactgttgacccctccagtgagtgttgcctccgtggcgaaggtcgctgtaagagcagcaactgatccagtgtttcctccgggtattgttgatgtgtacggcatcatgcgatacagtgaccagaagtagaagtaataaatattacaccggatcatacaaattctatctccgaatgaataagcagatgtggctggcacgttagacttttgcgcttgtttcgttttcatagatttttacagttagtaggggaaccttatttaactgatccatgtcaatcagtggtgaagatgtatatagtaaataaatcgtatcatgctcaccatgtttgattgcagtcaatgatctgctctcgtccatgttgcatctgaagttttttaagtggctacattttaaagcatccatcagttctaagatatcccttctaaattataaaatataaaacatactcagtccgttttaaattgctagtttgttccaagttaaacattttaatctttgaccatcgattcctataattttacaataatttaacatcgtacgatttatattttatttttagatttaccatgagcactacttttataatatataatttacatataatttacatgtttctaaactccaggcttttaaaaactgatggttgtgttacctggagtagaatgatatggagagtattagacttttacacggtcttcatgttatctttgatcgttaatttcttttataatatagcaataaaaggtatacccccaaaactttgattgaaagttcatctagcacctctgaactttgaagcccagacatccaacccccaaacataccttttatataacaccttaatatagttttacaaagtggtttttatctatgttgaataagttttgctaggtgacatatgcattagataagttaaaatctccacctaaatctttcgttttaacaacatatttttgctctcatttacaaacagttgacaatattataatactaatatgacatcactagagtataatttaaaatttaatgatcaatgatcgacgatatgtaaacatgctatattagccattcaaaattgctgatttaagctttcaaatatgcaaaaccactatcttaaacaaccttaggatgtgagtggtatcgtaaagtttatatatccttttccaaccatcatataaaaaatataatttttaacgactactacaataccatcatataaaaatataattttagttcaattagcacgattctcagttctgataaaccaaaacactactagtacaaatagatagataattcaatagggcaaatcctcatcatcgaccaaatgaattagcagcctcgtatcatctcagaaatggtacatcatagtacagcagcacctgcactaatttatgctctaaaaatcggctgatccaaagcctccgggctctcttaagctgaaggatacacgaccacatgacatcgacaaaattgttcgttacagcgtcagaaaaattttcagacaaaaagttcagcgtctctcacctgcctacacctacacatacttgcctctgtacttaggcttggagtccctgtctatggccggcttcccgtcggcggcggcggcggcctgatcggcggggctgaacacggcggagtggaggttcccctcctccatccacttatggtggttctccctgaactcgcggcgccgctcctccgccgccttctcgacctcctcggtgtagggcccgaccttcaccatggtcagcaggacccggctgtacctcatgctcaggatctgctcgcaggaggcaagcagcctgaagcaggggtgctccgggtacttggccgggttggcgacgccgtcctcgcggacgacggggaagaagaagaccagccggccacccatgaccagcatcctcgcggcgaggtggaggaggtcgtggacgcactccgcgaggctgtacggcgcggtggatgggatgtggctgtccctcttctcgtccggaaccgtgtacggagcgacggtgccctttatgagcttccggccaccggacttgcggcctccagcccggactccgtatggtggatcacagatgatggcatcgaaaacctgattgatcgcaagcatcaatagtgtgtttatcatatcttgtcgaaaaaattgaaacaacggagtaaatcagtaactttccagagtatcttgtagcatacaagcagaagatatatcaagccaatggttatggaaagttttattaaaaaaaaaagctatggaaattaaggcccatgcgcttgtaggctacaatagcttcatatggaaattcagttgtaggaaatatttcatcagttaaaaagctacgtgagaattcaattacttcagcatcaaccattttctcaagcaatgtcaaccaaataaagcaatgcaagaatgtaaataacaaatccaagatttcaagcacaactaaaatattgcatgaatgtacaggaatcactttatgcgttcctcacatttgtttcagtttttagtcgcgcatatagtacaagcttacactgtcaaaactgtaaaattcaaaaaaatacaacaatgtataaaccgcacaacagagtattacctccttcaatcctggacgccaaggtgggacgttgttatccgctcttagtatacataatggttccggcaatttgtactgaagaagacaatataattagtacttcacacgaacctcgggtgttttactaacaagtgataaatgccgaaatgtcactatagttagtacacataatctgcataagctatatgataccaagtcaaaaactaggcaagaacagcgtttaagaactaactgtcataagagaattgcagctcacacagaatcaagcagatcacaacaggatggaagaatctaagcaaaaaataatagctaacttcaatcaatcacctgctcaaagttgctccaaatattgcaatctggaccacgaccgtcccgcacaacccttatatcaatatctgcaccctgaaaggcctttatcagtaagacatactcacaagcagaatgaaaattattcgttatccgtgcaataagcacaaaccattgtcatggctccaaaatgcgcggctgcaaccaaaatactcccagtcccaacaaaagggtcatatacgagcttcccggggcgcgccagcccttgattcgccataagaaatgccatttcagcatccattgcggtcgggccaatatacttcctgctcttcagctgatatgtcggcaggagatgcctatccgccgctccaacctcgcggccaaagaataccgtcctctgagcaaccggcgggaggccattgttgcagccatagtcatcagtctccatgacaaagaacttatgatcgggcttcttcaaattaacacggccctggaaatgaggaacagcaccaattacacacaagagaaaataaatgcatctgacatccacaaattcgtgatccgaactactccatgaactcccttcgtcccaaaataagttcatttttcaccaatccaataccaatacaacataaaaaagactataatacctactttatcaaatcccaacgcaattattcctcactttatctactcctaacatatttatcttctattttcataaactccgatgcagtggttactcaaaaatgaacttattttgggacaaactggggaggctaaaattgaacttattatggctcaaaaatgaatttaccttgaaggggatgtaggtgaggctcttcatgatgtcgttctgctcctggaagctgatgaccttgccgaagctgtcgacgacgatcttgaaggtgctctccggcgtcaggtacggcagcttcctctcctcggggtacgccatgaccaccctctccagctcctcgtaggtggtgccttgcccccacagctcgtagatccccttcaccagcaagcctacaaacacacacatggcgtcgcggcgccccccaagattaacccgcaagaagaagcttagccagcgaatggtggtgaatcaatcgatcaggcgaggcgcttttactgcggttggcgatctgcgcggcgaggcgctcgtcgcccgggaggcggacgaggtggaagggggagtcgacgtggtggttctccggcatgcgccactcgacggcgtccccggcgccaggcccgccgaagagctcggcgagggactgcacctcgggccgccggtagtcgaggagcctgtggtagaagacgcagaggtaccacatcctgtcggctcggcgtgtggccctaccgggctcagctccggcgagtcgacgcgggcggcggcggcggcgagcgggcggagaggaggggagaggagggaatcgaagctgcgaagaaaatgaaaacctacttaaaccgcccgagggacagtggccgacatgtggggcccatcgaatgtatgggcttgattgtgaatgggctgggccttgattgtgaaaatgctccctgcctctcctcttccaaaaggaatgcagtgatctccttgaatttaaaagtactgtttgtgaaagaaccaaaaatacttcaagtggaatttaaaatactgtttgtgaaagaaccaaaactaattcacaaattatatatgtggagatgcgggggatcgaaccccgtgcctctcgcatgcaaagcgagcgctctaccatttgagctacatcccctttagttgttttgttttcatgaagagttccataaagaggtgcggtgaaatagatgtggtttaaaacgttctagcagtatttcccacgcaaattgcaggccatgtaggattgcatttgctataagcctatagctagtacggagtagccctttctaagggcatgtttggttgaaagcactaccaaaatatttgtagtgtcaaaccttgagcaagtttgagtactatcatttttcctttttataggaaagagtagtatcaactctattgactttgataaaaattggtatcaatccaaatagctagtgtatactattgaagttaccaaataagtaattggtaaggtaaaatttgacttcaaaccattcagaccaaacagaccctaaaaatacaggtgaatttctcgtacagttatagtagcactagcgtacccctttttttcttagccggttaacttctctaatgatctaaaattcaaaagaagctgctttgattttttttcttttttagaataaattcattattctccagcagcttcttttcactatttactaaaactacaatgaagcaattaagaccgaaaacagacagattgactaggaatacatgaatgatccatgagtgaaaattcaccaataggcagaagcagaggacgagatttcaaaacaaagaaagggcagagtgccattaactccagagatggactggttcttgcaaatggtttatcatttcaagtaaacatatactcgagcgcaaccaagacattgcaattgaatgtatcaatgaattagaatgaaccacaaggttaaagggcaactcgatttcatttacacaaatcttattgtttttctcttctcatttcacattcagaatgtctaccagctcaaagcttccgagtttatggaaacagagatgtttaaggccatgtgtgaatgtaagttttcagattacagggaaggagctgctgccaaatttcccagcagttaggcgttcaccttgtggagagtatactgcgaaacttcaagaatcaaagtatctgtgattgcgcatggatcatggtctacatctccgctccgaggtgaatccctttccttccaagaggggcacaaagtctcatctctgagttcactgctcagatgcaggtgcaacttgaatgctttgatgcctaggaacacctggatctatcgcaggactgcacttctttatgtagtaagaatgcatccccttggtctccgctgaatgcacgtcgctcgaagctgcatactgtgagctgcctcagtagtttctcgagacatgagtaaaggcaactctcagggtccttcatgttcgggttcgttgacaggacagctgcattcactgcatccgctacaaattcccgctgtggagagtctagcagatatccaatgcacgattcggcaggcttttcatatgcaagcagggccacgctctcctgcaagtagatttgttcactttttagctcagaaattgcaaagcttatatagatgtgaagccttaaaacactttgctattgcaagtaaaattggacgcattacaaatgacccatcaacatctaaaaagccattgcattacctttagcaacccatcaaaagctttatgtgtcaagaagttggccaggttagagcgagcatattttacagcatcctccagttgtccagcctaatgcaagagaaactgagattatatcattatgaaacaggatatagtgtaataatgcaacatgtccaagtgcccatcaccaccagtgagcatgcaaacgaaagccctaggtgggcaacatcaaacagaaccacatgccaatttgaccagatgtcaaaataagttgatctcacatatgctccctccagtcaaaaacaaatgtgtgttttggggtgcatcagccaaactccatttactactgttttttttagattggacaatttatcataatcttacatgtgtgttgtattttattttattaaagtacgtagtgtattatttttcatgtgtgtataagtagtttgtcagttgatgatatgcttatttgcatgcaattttgtagcttcgatctctagagtataatatacatatttaaccaaatagctgaatgttaggagttcagataattaccccgataaattcaatgaatctttgggaatggagtaagaagcaaataattgatgtttcatcctgcaaaaaagaaatgatttcttagtggtgaactaactctttgcggaaagtacatcatggcaactgaaaatgctaggataaacatagtatttgactaatcgtaatgcaagcaggttattaaacttgcaaagcgtacaactttcctcccaaaacttgtgttacaaagtaaaatgcaagttcagggatgaaagtggagccacctcataaacttgtattacaaagtaaaatgcaagttcagggacgaaattggagtctgcacctatcaattcacattagaagtttgtggaaactgcaatgagtaaatgaataattaattatcagatagaagactgtacctttatcacctgtggataccattctccaagttttttgaatgcagaatcaatatctccactcatgataagcttcacgaaatcaaacaaactgttttcagaaggcagaaaccacaccaaaaggggggaaaatcgaaaggggccaattctatgaattatgtagtatctgcacagtatagcagacaaatggaatagctgcacacaacggtgtgcaaccaaaaatatggaagagattaagtgcagtgcagtccaaatacagccgagctgtgataaaaccttgttttacttcagggaaaaagatatctgcctatgaagcttgcattaataaatcgtaacatctcaaaaggttaatgaaatctaaaaaaaaacataaacactaaaaaatagtggacgtgagctggagcctttaagactgaaaacaaatgtcaggttagtccactcacaacactacagtctacaggtggtgaccacaacaaaaatcaatatggatacttggcacaaagatgctctaatcatcagtgggtagtaactggtatttaactgattaactactgtaaagccctggtttcaagagaatatgtatgatcttgtaaaaatcttataaatactaacaattgactccccagtgttgcttattagtagattagaaaaatggttcaacagcaataacaattcagtttcaaataagttttccttagctcacctgacgcagcaattttctgtggctaagaccatacatttcaggaggttccccataaccattttgatgattggatggaggatcagtttcacttgccatatcaaaagaatttaatgtatcttggtagccgtaatgtaggagatatgaacgaacaatcctgttacaagtgcacagtacatgtacataaggcggcaaagtataaaagatttaatgtcaatataggtacaattaaagattgagacaaggtaggaatgaagggcggagtgaatatggtatcaaatgtagattacgtaatatggtaaatttcacataaacataacaggagcagacaaataattgacagcacaagtcagtgattatcaaacataactcgctaacctatctcacaagatacagaatgatctcaagatgaaacagtgatggattcttaacatgagaaagcataccaatgactgatgtctggttgcaaatccaatttgtcgctgacagattgttgcttcattttctcttcaaaaatatagccctgccaataagaatcatacttagtgttatatcatgtgtgcatgaactaaacaccaaataggtaaatatacatgaaaagaatgagctgagtgataattgtaggctataattccataatgaaaaccaattggttcttatggcaccatacaccatattttggtggcctgattactacctaaaaggatgcatgcaaccaaaagttctttcaattatatgaaaggagctgcgcttaagatgcaatgcatctgaatttggaaaactaagatggataatctataagacattatgatatatgtttaattgatgcagcaaactgtggaatggaaaacatggaatttgaaataatactccataaggaaatcatgacaatattacatttttgtgtgaggtccttaataggtgaataggaatatctagatctattggctcacctcaatgtcaaaacagaatggttcttttccaaagtttactgtcaccctgatttgcaaaaatgaacaatcagatccattgaaaagctgaaaattaatataataatttatgagttatggcacataacgcatgcaattccaagcctaaataatatattaacacaagcaaataatttcacttaacaccatttttcagcaacttaggtttaactgtcttggttaaaatgcaattttccatatttggaatgtctattttcattgaaataatcacttaggcagcattcttgctgttaggttggagagagtttttcagcgcacgcaaaacgagaaagctcattagcatggattaattaagtattaattattgtaaacttgaaaaatgaattcatttgaattttttaaacagcttctatatagaattttttttttgtaaaagatacatcatttgacagtttgaaaagcgtgcaaatggaaaaccaggaagttgaagtttggagttgaagaaaagaactaagtcttaggaacgggtatcttactcttcatcttgactatggactgcaatggtaggatatagtgggcctttaatttctttttgaaaggatccaactagagatccatttttcctgcaaaatggtacatgtaattagattaaagtgcagaatgatatcctgagatgaataagcatggtcaaggcttctgaaggagaaaaagaaacaagcacatggaaagttaagccagtaccagaggcgtagtggcagatgcaaatgcaactgatttccaaattcaatatttaacagccaacagctgtagtgaagacaactcttgcgaatttcaaaatattaatgaaagcagcaacaaagcacagcattcatctcaagtcaagaaaaaaactcacaagacaaaggatgaaagctatgaactttaagaaagtctaaaatatgacgactaaaaggctaatatagaatagctaatcggagaagcagacgctgccatgccaatttagaaagaatgacagaacttacgtgaagaaaaattcttgtgagaaatagttgatgccagcaccaattgtgtcaccagaagtgaatttgggaccaaatgactcacttttcccaggaccacggtaaagatagccatcatcgccatgatatccacagctgttagactcccagctggaatgaatatagaacaaacatgataaatttaaaaatgtcatcaaaaggaaaaaaaataatatactttagtggtaaaatttgaagtccactcaaagaaagaaatggtgggccatactatttgctaactatttctctgaatgtctgtctattaaattattaaaattaggtgaaaaggagtctccatgtttgccaaaaacctagaaagtgccacgttggtcccagacaaagaaaaagatctgcaccattgattctatatgggtttggtttataaaggcatggtctaaaataatgagcctacaccaaaacaccatttagaaacaactgaaatttggattgaaaaatataagataaagagtccatatgaaatacaatctagaaaaactgaatctccattgaaacataaaatcaaactgatagtttgattccatacaaattccaatgttaaatgtcaaatccctatataactacaactcggaataaaactaaagttgcctgaagcaaatgtacctgtgcaagtgtcagggtatttgagacaaagaaaaatatttacactgttgattatattgtgggtttgggttttaaaggcatggactaaaagaaaagagtctacagaaaaacaccattttgaaacaactgaaatttggagtgacagatataagataaagagtccacgtgtaatacaatatataaaaacctaaatctcaattaaaacataaaatcaaactggcgatttgattccatacaagtttcaatgtaaatccctacaaaactacgattcagaataaaaactaaggtagactgaagtaaatttacccgtggaaatgtcagggtatccggctaatttatagaaattaagataacttcagccaacattaccacaagttagccaggaaatcttcctcaatagggccaatattagaaacttcgatgcattgaaacaaactgaaatggcatcctacctctttagcatgataaacctagcctatgcaacaaatagtccaattcaaccagtgcactacatgtacttaggtttcctcgtagtaattttaaatgaatttgtgatccccacacattatcttaggttcttaggcaggaaactcaaccagctaaaactcggttgctaccataaaactgtggcattttctcaaaacgaggatatacacatttctgattgccaacaacatcgtagacgaactaacagcggaaccaagcgacagcaagggcagaggggatgctaacccgggctggcggcgcatcttgaaattctcggtggtgaagccgatggaggtctgccccttctggccggcgttcttgacgcccatctcgaagtagtagacggcgcggcgcgtgggggcggggcggttggcctgcacgacgccgacgtcgtggccgtgctggttgacgccgaggtacctgacggacatccggtcggtagagacgacggcgaagaggcccgagctgttggtggtgttgagctcggacggcgccggctccgcctccatctcggccgccgcggccccccactccgccggcgaccgccaccgcgacgccagcctcatcgggtcaaccgcccccgccgacgcgggcgccggttcttccaccaccgccgccgccgcaaccacctcgttcgccaccattcgccaattccaaaaccccccctggtagcagcagaaacggcaccaagttagggattcgattcgtccgaccaaaaccgaaacggcgatccatccgggaagccctagcacgagtggcggggaaggatcggcggggagcttaccgagtgcgggggatcgagctgccggcggtggcggtggcggtggcggcggatcgggcggcgctgcggttgcgggaggtcggagtcggaggagaggatggatgggggaagggaagggaagggaagcgtgaggagttgggcgtcgcgtcgtcgcgtgtcgtgtcgtgtggcgtcgcggcgagagagagggggaggggggtaacgtactcgtgtactttccggcgttttcgcgacggctgtgcttgcgttgcagtgtggatgaatgaactgtagagacggcccgtgttgttcagcgggtgaacagtttgggctttcgcagggagaggcgacgcaggttcgaattttttttcatttttaatttttttttcttttaatatttacagaaataatccatcggcacaaaaaaaattacaaaaatagaccatgccgccctccactagggcggcaagctgacgtggcaaacgggggagggacgggcggtgacggcagacgggagagggagcacggaaaccctagggcggcaaggggcccccatgcaaaaaagccagcccgggcctagtacttttttgctggtactttttgcatctgggccccttgccacctgggcccagatgcaaaaagtaccagccaaatgctctttagggctgcgaaaattgcatttagcccagagggcagcaaagggctaaatgcaattttcacagacggcggcggacggcgccgtcgagccgccgtctaccacgtcagcttgccgccctccattagggcggtatggtctatttttgtaatttttttcgccaatagattatttctgtaaatattaaaagaaaaaaattaaaaaatgaaaaaaattcacgcaggttcactggttcagtgaaaaggaaaaaaaaatttcaacatggcctgttctaataacttcgtaaacatacaaaactttcctcgttttcaaactaataaatggttatcttatacgaaaattttctacataaaaattgttttgaaatatcagataaatttatttttctaagtttttaataattaaaacttaattaatcgcgtggctttctcattttgtgtgcccgcttttaatcttcatccttagaagattcgaatggggccttacacaacactttgcgtagttgcgtcggagtatataatatgcatttatttttatataaaagccaaataagattttctatgggggtttttaaggcagaaaatatggttgtaaatgcaagtgtatcccctgacccatcgtcacgaatgaacggttttctcacttttacaatgagatttcctctttttacaaggaggagtgttgcagttttcaacttgaagtagagaaacggatgcttgaatcatgggtttttctaactctgtaaattcttgaagttggagttgttgaggtgagacattaaaaattataatttaacctagaaattctatgattttacaattcaggaattagaagcataccaaaacaataccagggcaattgatcagccctatccctcaatttagcacgcaatttttgttgcacgcaaaacaagaaacctcattagcacataattaattaagtattaactattataaatttaaaaaatatttgtatttactttttaaaacaacttctatatagaaactattttaaaaagcaccaattaacagtttgaaaagtgtgctagcagaaaacgatgaagttgaagtctggagttgaagaatagaatatggccttagttgtaaacgcttaatccataaaaccatgcccctttattttgaaattgaagcatcagactagaatattagaaaatatttctgtctaacattatacttttataaggatatacaaatagggacaagcgtgattttatccatatactgatgtattatgggttgacacctttcaacatcaatatcctacttttttcagttgctacaaatgctctaataagtttatttacaaataatatgtgaagcatcgtacagttctgtttggtgcaaaatacctgtaattattgttggcacatcgcatcaaagaattggtcacttctaaaatactactccatcaaatcaaaccataatgcagtgttttttcaacgaccacttagccatcaaatcaaaccagtaaattcttgttgatgtagtactaaacggtagctccatagtgcagtgttttctacttgatgcacaacaactattctagcctttttaacttttaatgtgagtattagtgcatcgtctaaaagccttaggtatatgaatcatgacccttataaaaaccagaacataacctataaatctacacattttccaggtacacatatatttaaaaaacataaaaaaaaatagaaagaagtatgcatagctcaattggttttgtctcttgtggtgaaaccagcctgtctgagtttaaaccctaaacttgtggtgaaaccagcctgtctgagtttaaaccctaaacttaagtacttaacatgagtttcgtatttatggctaattattcatttagttgtaagcgatatacctatcaatagcgagacatttgtggccggtccaattttccggatgtgctcatagggataggatgtgtgtagagatggcaatggggacccataacccgagacccgacgggtttttactctattaggagctaatcgtgttcttactgttatacccatgggtctactaacgggcgaaaactcttacccattgggtacgtgggtatgggtctgttctttacccacccgtacccaccaacccgtgggtaaaaaaaacccgttgattgaacctaaaactatgagcaatataagtttcaacgactactaaatcatagcataaaacttctttcacatcttaagcattgttctatactagttatgtgaaattattattagatttattgattatgtattgtggttgtataatttttttactcgcctttgaacactaatattaatagcattgttgctagagaaaatattgatagtttagaactctaatatggctaattagagtacaaaactataaatgctacaagtcaattatatgggtatgggtacccgttagatacccgttacccgcatgggtatgggtatggggacgattttgtacccgcgacgggtgtgggtatttaagtaggaatattttaacatcatgggtgtagggctgtgaacgagccaagctcgagcgagtttgactatgtaggcttgagcttgacatgaactcgagccgagctcaagccgagcctgccagcctggatactgatcgagcttgggaatgagctcgagtttaagctcgagcgagcttcgagcctactcgagcttggtagcttaacttggtgaaactccaaagaacttactcttatataagagatattaatgtaaattatcggtagtcaaaattaatgggtgctatttgtcttgaatgaagcctctgcagcttttctcatgaatacatggctttgaaacgttgcaattaacaaaagctagctactacatctaataggaatagtagtactattactagcagccgaataattactttattgataagcattgatggggtcttgagacttgagcaggtcaagcacaatgacaagtatatattggcccatcaaaaatatcttcctacatgcaatgcatattatactaatcaagccttgtcgagctattcgagctcgagcttgctaggcttgcgagcctcagcctacgcttgagcttggcttgtctagtattcgagccgagctcgaatcaagcctgtaacgaatcaaactcgagcagcttgcgagctccaaacttttttgacagccctacgtgggtgtgggtatggggcaagggaacccgatgggtatgcacccgttgccatctctagatgtgtgtccgtattcatatgggtgagtatatatatgtcttgtgtgtgcatgtggatgagtacgcaatgcgagtgtatgcatgtgtactgtgttgctaaaaaattgagaataatttacttttaaaaaagaagaaatggcatcaattttctttttttgaaaaaaaaaaaggaatcgacaacaatacttcagaaccaaggaaggaccgtaacggccgtccgatcaccgccccagccgcggaatccaacggccaaacttccatccatccacccgttgcccacccccaaaactcaaaatcaccgaaacacccttacccccgcacgccccctccctcactgacacgtgggccccacgcctcctctctctctctctccccagatccgcgcctcgaaacattcatctcgtctcgtcgggcgaagaagcccgacttcccacccactctccccgtctccagaagcagcagccgagccgccgccgacgagcggcgatcgccggcggtgggttgggctggcggctagcggcggaatgggggtgccggaggcggtggcgctggagatacctgcggcggcggaggccgaggaggaggttgaggaggaggaggggtcgccttcgcctccggtggtggccagggtgccgccgcggatcaggaggcggctcctcctccggcaccgcgggggagcgccggccaccgcggaggagatcgaggccaagctccgcgatgcggacctccggaggcaggtgggtcgctgtgatctctcggcgcacccggcgcggcgctttcgagatttagttttatggttttttttttcgtgtttctgggtgatttggttgtggttttggtcggtggattaggggcatctgtgcaattcatgtcaatatacgtttcatcaggttggtagttagtgaattgggagtagcattccggagtgcagattttagtcacgtagctggattactgaatggtttgtgttagaagcaattggccatcacatgatttgctgggagttgattatcaaggtaacgctgttcttgatcaaacccgggagccacaatataacttggggtttatctcaaccatgtcaaaatgggagcccagattcattttaggatgattgatatttgaaggcttccaattttgctgtcagcctgtaaaatgggttctacaaacaacaattaaaattggtgttgttgccaagttcatttgaaggactggcagaaaaaagtacgatcactgtggcttgttaactcatgtgtattctattcctccagcaatttcatgaagcgttatcgtgcaaagcgaggtgcacagtcagatacccttcgtgtccatctcaggaggaggatcctaagaagcgccttgaagcaaagcttgtggctgccgagcagaaaaggtaacagaaagagggacctagtcacctagcagagcatatttatctgatcggatattaagatagggaacagtgagaagtgatttctgattgcaggttaagcctcctggctaaggaacaaagtcggcttgctaagttggacgagctgcgtcaggctgctaagaatgatgcggagttgaggttcaagaaggagagggaggaacttggcatgaaagttgaatctagagttcggcaagcggaggagaaacgtacacaactcatgcatgctcgttcgcagaggagggctgcactggaggaaagaacaacaaagtaccttgtgcagagagtggcgtgggaaaacaagtacagggagcgtgtacattcagcgatcctgcagaagcgcactgcagctgagaagagaaggacggggctattggaaggtgagaaaaggagagcccagggtaggttttcacaggtccaacttgctgccaggactttatcttgccagagagaagctgacaggagcaagttaaaagaacaactagaagacaaacttcagagggtattcctttttatgctgcagagttggtataattgttttagtagctctttgacttacattgcaaactatttatgcaaaacaggcaaagcggcagagagctgagtatttgaagcagcgaggaagtactcacagctttacatacaccgcttcagttaaacacggtgattttctttcaagaaatctggcaaggtatggtagacttatacagtcaactttctcgcaattgtttggcttgtgtgtatactttaaattttattgattattctattcgatttgatgcttcagatgctggagaagattcataacatctaggaagacaacagtggtgttggctagggcctttgacatgctaagaataaatgaggaatctgttaagcctatgccatttgaaaaactagctctttgcattgaatctcccacagttcttcagaccacaagggcatttcttgatcgcttggagagtcgttttactttatctcagtcatcaagtccatcatcaccagaaaatattgatcatctgctcaagcatctgggatcaccaaagaggactctatcaaaaagtgggggaagaactagagtgacaccaacaaaggcagctagaaattcagatgttagcaagttacctagatattcaccgaggatagttctttgtgcttacatgatactaggtcacccaagtgttgtttttaatgaacgaggtgagcgagagaaactacttgtggagtcagcagaaaactttgtgaaggaattcgaactgctgattaagacaatacttgatgggtcaagtggtgcatgcatactgaaacagccaatactagatgatctgtctcctggatcttctaattatcaggaatcttctgccgttgttgctgatcggaagaaattcagatctcagttggcttcttttgacaaagcttggtgtgcctatctttaccacttcgtggtgtggaaagcaaaagatgcaaagtcactagaggaagatcttgtcagagctgcatgcaaacttgagctatcaatgatgcaaacatgtaaatttaccgctgaaggccaaccagagaaccttaatgataatttaaaggccatccagaaagaggtatggttatatacctggtgccttttcctttgtttttttcttttacctatttccctgacattagtaattgagaagtattttaagtgcataaaatcccgctattcagctattgcaggaagcagtccattcctacaactttgcacttagtttatttattttgattatagttttcttttgtctagtcaaaactttactatctgttgaaattgtttctgttcatcacccaggttatggtagaccagacacttctaagggagaaggttcggcacttgggtggtgaagctggtattgagcggatggaagttgctttatcagaagcaaggacaaagttttttgaagcaaagggaaacaggagccccttggcaacaactataaaaaatgtagcagctacatgttcttctggagaatctcctatttctgacatgaaggagaattccaacattaatgataaaaggccaagtcaggctgtccaatctatgttcagagttccctcttcaccatctgaaagtaacacagcaggcatcaccatgagtaatccaatgacagtgagcagcactctgtcagaaaaacggccaacagagaacgagcagatggtcaatgagattcttcatggttttctagctgacagctctagtaatattgggactgttgagggtggtttcaaggttagatcctatgttacatttatactaggattatattgtaagttttcatattgctggggtgcagacaataataaccaaaaatgtataacatgagaaagaatttgggaagcttttagaggggctcacatgctgtgatttagggtctagattctattaatgtggtacgtctatcagcttaaatatgaacttttttgcatccagtcactcttttttttctcaggaaaaagtaagggaaacaatggagaaagctttctgggatgtggttgtggattcacttagaggagacatgccagactacagctatctggttcagctggtaaaggaagtcagggatacattgtatgagatggttcctaaaggttggaaagaagaaataatcaacaatattgaccttgaaattttgttgcaggtaagaagagcttgagtgattttatcatgaatctacagaatatatctgataccagttttgttgttttttggttgaaaggtacttgaatcgggcacccaggacatgcaatatttgggacagattttgcagtactctctgggtatgctgcgaaaactatcctctcctgcaaaggaagacgaaatgaagagaagccatgacaaattattgggtgaattaactgaacactctgagtgtaataacagtggttcaaattcatttgtaattgctgttatcaaaggtttgcgcttcaccatggaagaactaaaggtttgtgaactccttgagttcttaaataaacttcatggaatatacattgtgaacctataacagcctccattttttttattttttttgtaaaataaacaggctctgaagacagaagtcagtagagcacgtatccaactattagaaccaattataaagggctcaggtggagtggaatacctgcagaaggcttttgctgatcgctatggattcccgtccaatgcatcagttgctctccgttcaactgctcagtggatttccacatcaaaagataccgtggaagtagaatggaatgagcatgtcagctctttttcagctctgccagaaaccgatcatgttaagtctatgaattaattttatgcagtagtcacagcagtacacaaccgctgtttgtagcaatagtagttcaagtatctattattttcacctgctgttgattttacttacacatccctcgtaacaggctcagccatttgttgccaccctccgatcaggtcatggagttccagatcagcgacagtctacaatacctgtgtcaggtatttattcttttttccccttgtatggccattgttctgaactccttaatcatttagtgtcatgataagcagatgatacggggctaccagagtgcacggggcaaaggcttgaccagctaataaggattgggttgttacagctcatcagtggcatagagggtgtgcaaatgcagtcagtaactgagaccttcaagctcaattggttgaggctgaggtctgtacagagtcaattccagcaagtgattgtaattgcaacaaggtgaaacattactcaattttttcactttattcacttcactgctctgagtatcagcagttagctagaatggtataaccaaacccaattacgcctcttttttttcctcgcagcatgcttgtgcagcgtcaagttttggcgaccgacgacccaaacatcactcccacagagctggaaagcgcgacatcacaactgttcaacactctcgcagagctactggacaacttccccgacgttagcaccgccaagatcatggaggtgatgctccgttcgtcgtcgtcgtcgtcatcaggctcgacaaccggctctccatcagatgaaagaaccgagagcaggaagcagatactggccagggtcttcctcaagagcctccagaccgatgaccccgtcttcaagaaggtctcccggtccgtctactgtgcgttccgcgcgatcaccctcggtggcagcggtgccaggggacggaagctcgccgacgccgccctgaggcgcatcggcgcgacgaagctcaccgaccgggtggtgagatcggccgaaatcctcatcagggccgcgtccatttcacagcaggtccacggcccttggtacaatcacttggtgtgattcatggtggaaaagctagtgaaaacggcgtcgtttgagcaatctgaaccgctaagcgttcgtgtgaagaaccgaagatctcgtcttgtttacttgttagtagtggcaaggcagatggtagattggtacgtgagcaatgccctgctgctttgtgtgaataaataaaagagatggtactgtactatgcttgtatctgaaatcctgaacaatgtgtgcgtgtgtggtggtgttcatacgtgtgatcaaatctatgcttgtatatatacgaaacttaaaaatggtttcatcaatctaccatgtagtgtatacgtgcatatccttcatcagtacatttgaatctttgtgaactgtgatgatacgtatacaagcatcatgtctgaagtcacagacatttctgatcttctcttcttcttctctatctgcagcagcagcagttcaggaggagagctggtcctctgcggcggcggcggcgggggacgccggcgccggcgacgaggcgtcctctgtggcgggcgcgtcgacggcgggctgctgctggagcgcgaccgcggcgagggacggctggaacttggcgacgtagtagctgagcggcgggccggagtagacggtggcctgcggcggcggctggttcttgccgacctggatgaggatggacgacacgccggcgacgaagacgagggcgaggccgccggcgatcgccgccgtgttctccgacccgtccgccgccgcgcccgccgcccccgagctgatggcgctctccgccacgtacaccgtcggcttcgcccacaaccaattcaggtcagaagaaaaataaaaagaagatatttcttgaccacatttaatacgcaggaaaaatccgaaaaatttgaattaatccgattttttttaaaaaaattctataccgcatttaatacgctcgcgaaatttatgggcctgtcggctgcccgggctgcccggcacgaacagaccgatagtttaatcaatccgaaattttgaacaaaacgagatgaaactgaattgaactttcaaaaacaaacctgatactagacacaccttaactagaatgaatttgaacagaggaacatgttcagattcgtgatgttacgatgtggagtactatgtatgtgagtacgtttttttatgggacataggaaaaatacaaaaaaaaagaaagaaagaaaaaggaaaatacctcgacggagtagatgttggtttggccggcggtgtccttctcgacgtagccggtccatcccttcttcttgggagggaaggtgccgaccaccttggtccgctcctccgccagccactccgcgctcaggctccccacctccttctccggcgcgcactcctcctcgttgcagtcctccgccgccggcgccggcggcggaggtgaagaaggcgacggcgacgacgacgacgacgaggcgttgcaggacagcaggaacagcctcccccctcgcgcgaggctcgccgccgccgacgccgcggcctgtggcttggcggcggcgctgctcctcaggaacgcgcagcagctggtggtgctcgccgacagcatcgactgcgccgggcaagccatctcgctgcgcgccctcctctctactctctccggaccaagaagaagaagaagaagaagaagaaggaggaggagaaagggatggcgtggctagctagctagctagttggtggaatggtggagtgagcggccgcagctagcggaggagggagacgagggagccttttatgccgtcgtgtcgcgtcgcgtgcgcggcgaggaggaggaggaggaggagaaagatctgtctggctgtgcgagggagaggatgggattacgtgggtggagcggggcgggggtgtggtgggtggatcctccacgtcgcctcagcttggtctgtgtgtactgtatcaacggccaaccggcaaccggtgaagccgtcaatactcaagacagagaccccaacgtgtctgcctctgtgcgcgccaatgcctggaggctgcccgccactgttcgtgtgcttgcagcttccccggccgtctctcaccggggaggcgtccaaatataatccttttagccactaaaatttatcgtaagagataataatttttcgcctatattttagttttaatcaattgtaacattttacaatttaaagttttttacatgcatccttttcttaaccaataacagcattcctccatttaattctaccaacctttttattatactcgtgtccaacactccgtactagctaaagtgcacctgtatttttgtaaaacacttttattagaaaattatgatgctcgtactatcatgccatgtttagaaaatgggtttggatatgatttcccacccctcaaagggcatgtttgaatcttcatccattcttctcaccccgttttatcctatacctccattcgtttttattttccaaacacaccatcagtgttttcttgcttgatgttccttactgacttctttggttccgaccttaggaggtatatttggatagcttttagatcatgagaaattgtgggtggaaatttgaccggagagaatctgaagaataaacttcttgtttttctcgattatacaactataacttctcacaatctagataaaaaagtagaattgtctacaagagcttccctcggaatcaaaagcaccctatacaggacttgtttttttactttctttccttcgttcaccggtacaaggcaaggcgaaggtttcttatgttaatatttcgcatatgtccctttgtttctaaatataaatatttttaggttgtttagaataaaagaaactttttatccttcattgtcttattggtcaaaacttgaaatttaatgttgagttaattgcggtttggactggatttctttatcaaagttgcataatggactaggtctcatctcatattttcactttaaaccagatggacttacaaattgttgcaatttggacctgattgatgcatgagccacttgatgagctcttctccatgtcctcaaactgaaacatggttgcacgaaggaaggatggagctaggcttgctcatcgtcaaccataaaccgtcgagatggccgcctcaaatcgacgcaagcgcagatccgctcaagcttaggggctatgtggtgcaggagcaatttgacgagatgcgaacaatgcgacggagggtggcacttcaaagtgctctgttagttattgcatgtttgagctttcacatcagcctagcgagctcaaggagagagagagcgcaagggaagagagggaaagatggagaagaagcaaagtgtcccaaagtgaaactatatgtaatctttcccggttcaaactaaaaatgttgtgctgctcctattccaacttgccacatgggtaaaaagaagtggccctatatgcaatttactcttttaagttgcttgattcttctcgtaagcacatgacttgggattctataacatatctcacacttcccttctaatccacctacctctttccatctcaaaactctcctcccctctcactctctccagctaagcttagctttccactttgagcgaccattatcacctctctcatttcactcggccatctatcaatcacactatcttacctcaacttcctcgccctttcttcttctcgttgaaatgcatgtaagctaatgaaaaatgtcctcatgccatcgccagttgaatgatatgctttctccattctaactccattctaaaataagtgggtttatttttatcctcttgtcatttgttcaaaaacaagttaatttctatctttggtccataaatcaatgaatttcattacttcaatactccttaactacccacccatatactttggtctttttctgttaacaagatgcactttattccctctctctccacgttattttgtacacccaaggttaaagttaagagttattttaggatatatggggtatgtaccaacattgtacggcacgcttgtttcaccagtgtctactgttgaccatggattacataacaattgctaaccagaatggcacacatatacaacattttactcgtcttgcgttgtgcagctaccaactagtaccaaattggatttgtccttgccactttttctgaaagtaaaatgtaaacctcaacgtaacatgtcacattgccaatttggcaatttccatagttcacgtaactggggctaatggtaatggtgctatgtgctgcaacaaacttacaaccacatgcatcagtgcatggcctcaaacaccattcagcagttctacatctaacaaggcacatctcaagtgaaaacaatataatgatagagaaatgtatcccctgcgactgataaatccaaaaccggcataacatcagcagcatatcagtttagcaactcatggttcctgaggctaataccatgtttacatgtaagataagttacactgggtatatagctccaaaaactagctctggtagcgctctatcagtccagtgtaaggctgtaaaccaacaggttaattggttttgctacctagtgatgattgctcaaagaacagccatgaggattggctaacaaataacataccacctcatcagaccttcatatatgttcctctgaaaacaaaaccctgtcatcgagtagctagctcagttcccccacctgcggacaagctgtcctcttggctacttagttatccttccatttgttgacatacttcaggaatgacatggatgggttatcccttggttgagcccggacacgtgtggaacggcgcaatacagcctcttcaagcaacaatttgtgtgtgatttcttttgatcgtttctccagagcattactgtgttacagaacaggaaatgattagttgaaaattgattggtgtagtaggaatcaaccaatatatttctaactacttatgatacgaataataaaatatagcaatggtaaacatcatagaattatacatgatagcagaaacaaataaaagtttcgatggtagtcttcttccagaatcaactagcaggtaatttataagagaactcttcaagtatcatcgatgagatgcagtaattattgagtaagaggacagcaaaaccagtatacacagtattcattttgcagaaaaatagtatgtgaagctacaaacaaaaatattatttttcacgttaagaacaagtgtaacgttagcccctttctacaatcaacagaaccaaaagttctaagttgaccaattgtaaggttcagaaagatctatgtaccttatcttactgtacaacttgtccagctgccgtttgagagctctctcccttaaaccttttacgttcagtgagctcattaacacatcgagctgtcattccaaaatatcaaaatatgatcacgactgtagcaacaataaataacaaaaagaaatcaactagagcaaaacagtcacctcttccttagtgctgtagtatccccattcttttgaatctgcactttcaacaaaaagccttccttcacgcctgaaaaaccaatacctgttatagtgtctgtcttttccaagggggctggaacggatggataatttttcaatctctgtttcgaggtgctgtacctacaaaaagtagggagtaagcataataatcaggctcactaccaattgtggtaaacaataacagaacatgggttaaatacagagaaaggtccatcacatgcaagtacatggattgagaacagatgctcaccccatggcgtttcccttctgtcttgcttcgagagatattgttcttatccttttcttctttccccttaccctgctcatcaacactctcattgtcatcttgcaatccatcaatgcttgagttctgctcatcctttgcctttctagtactctctcttttagtcgcagcgagcgcttgccgctggtccacccgttcacttagtttctctcttacaggagaagttgtaatagcttcttctactagttcccggagaatcttaagtttgatatcagtatcaataagactataataaccctttcttactgttgcaatgtttctggtgagttcttcagtttttgtcatttccaagaaatcacagagatattcagcccatgttactaaagtcacctgataaggaaataaaaaagggattaagaaacggtttcatcaatggagaaagagggagatcgagaaatgggcatgagaaaacctttagcttccgtttcttggtccgcagaatagtgaaatagtcaccttcatccttaataagcaagtggaatatagctgtatgtatttccacaagaagtgcattgctttctttgtggcaaattgcattctccaaatctaccagtgaaaatggggatagattcagaaccctcccgaaggacaagcagaagtcccataccataaggagatcgcccacagaatattttggtactctaaaatctgtagccagaggaggtctcttcaataaagcatgatcatctgcagaaggttgtactaagagatcatctattgggtacttaattggaacatttatgtgttcctcatctgcaaatcataccaaaaaaaaatcgataagtatcttggaagaatgccatagccaaaaggctgctaacagaacaattgcaacaaaggtgccagattcagatgaatcaccgttcttcatcttttttttgggatctcccataggtccatcctcacgtcttttcctccctttcttttgcaaaccttcaccaaactagacaaagaaagcaagtgttagtattgtaacatacccaaggaaataaaggacagatgaaaggggcacataaccaactcaccatcatgtcattcgggggctcaatgggtatgccatatcttttggcaagattttcatgtataacccatggggcattttgagaagttgcatctctaataaaaatcttcagcgtattcctactaacaggtggcctccggtgaatcaagtcttcacctttgatcactgacgtactgatgatagtcttgtccctaagaagccaaccaacttcatacatcttggtgccatcagaccctaaaatcttcaaaatcctgcaagcagcctctaaaccatcctgtttagcatataattctaatccttcaaatacagcttcctgcaggctagcatatatcttctcaacaagctcatataatccaagagtgcctgaaacaaaaggtaaaatgaagtattatttccaatctaattaagtgaaacgtacaaatgagaagcaatctatgatgcttcttgaatgaagcgcatatagtaggaaaaaggtacatggatactttagaattgcaaagcataacagtaagcatgcatgcctatttattacaggttgtcatgtcagcagcttagcagtccaagcagagaattcagagctataccttaatatcagtaaacatcaaaaccagatcactaatgcaaaagatacttagattagaaagaggttggtatactgtactctcttctagatattgttttagaacacatgcaataaaactattggaatattgataaagaaggtaagattgtcacactagaaataattactgatcattacaagttttactaacatataattagataagttatgatagtggaaattatgtcgctgaaactaataagtagaaaagaacggtaaaggatatacaaaagttcaaacaattaaaagaccaacagtttcacatgccctttttttaaaaaaagcaaattgagtattagtatgtctagtagctttgtctacagggaaaaaatgtaagaactgagaaatgttagaataacaaagaagaaaacaactgtaaccaatatactatcaagatccaggagcacaacggaatttcataaatattacatactgtattgaatcatccgaagaacaggagccatcagttctgtgggtaatttctgagcctttgacactgcatgatgctcggagaccaaagcttcttcaaaagtcaagtttgattttccggatatcttacatgaccaaaccctttgccgataaagattcaacctgtttatgtagtctctaattgagttgttaaggacacaagcattggagaaatattagtgcacatactgcactgcaaatgcaaaaggcatgaattcctgcaatgccacaattcagctgcattggcgtcatgaaagaggatactggtaatctcggaatatctcccttgtgaaccgaatttggaaaaccttctccttagaatccaagtccttggggggctcaagtaaggagaaaggtttcctcttgaaaagaggcattggacctccgatccaacctacataatagcaacgcacacggtttacatttaaatagttaaagagttaaccatgtgaactggataaagaatctataatactgccaagaacaattaggcaacagtgcatgaatatttagatgatcacgccacattttgcgaggcagagaggggaaaagaccagtctcaagccgcgcagatatgcaaaatgtgatgtaccaatcatccaagcaggaaattcagaacccagaacaacagattagcccattcgaatccaaccggccaatttccgatgtgcgaatcagcaaccatagcatttcacttaaatacatgatgagtcgcacaagctcaggctgctctttctctcacgcatttgcccccaaaatgtgcaacgcaaagcattcctgaccactcagctcacgaaaatggacccccgtgctccagaatccagcattcggaaatcctcgcatcgctcaaaatccccccattctctcaccccccccccccaccacaagaaatcccctcacccaagccgccttcagaatccagacaacaatcccctcgccgccgcccaccacggcgaaacctcccgcgcccgtcctggcatcgctcgagggtggcgtgaacccgaccacctcaccccgcgtcgcaaccaaccacgaacccccccaaccacagctcgtacgaggaaaccaaaacaacaggaagaactagggctcccggatctcaccgacgacaggtcaggcagggcgggggcacacgccgacacggcacggcacggcacgggaacgagcgggggggtcgccggggagcccgcgaggcggccgcggcggcggcggaggcgaacggatcggcgcgggtggcgcgaggcgttggggaaatgggcgttcgatttgtttggcgctctcgctttcgagttggtttttgaggaaggggaggcgaggagaagattggagagagagcgcgaaataagaaaaaaaaaatggagggaaatttttacggcggtgcgtcgatttgttctcttttcgcgcctttgttttgatggaaattcatgtttggtttgaactttcaaaggttcgatggatcaaaccatacccttttttaaaaaaaaaattaccatgggagtagtactattttgtttgccgtcaaacatttttggctttaccagcagtgatgttgacggtcacatgatattcgaatattcgaccggtgcaaattgtaaataatatattttgtaggtaatgaaaattcgaaatcttttcaaaaaccaaaaaaagggaaagggaaaaacacaaaaaagaagaattgattttttttttgcgtagcacgaactcctacttttgtgctttccttggtgtgccggtctctccacgtggcaagaaacgtgacacgtggggcactcacctgtacgttcgtggtcgtgcgacacccacgtcgcggcctcgcgggtgacctggtccagtcagtcagtcaccggcttgtatgcaaatgcaatgctttttctttatctcagaaaaaatgcaatgcaaatatgcgattaggtttcaattttcagaagtctcgggttccattttaaaatggcaacccatatattttgattggtataaaatactagtcattttattattaccgtgacaatttgtcatcttaaactattttgcacacccctagagcaaccacaatgtataaaaaatgtgaccttaagacgatgtttgcacttgtaaagtgggccatatacattgtggaaaatagcattagtttagggtgtacctcatgcttaagatctaccataagcaaaaagaaatatttttttctctctaattcactttatgaataagagatgaaacaattctttttccattgtatgtggacttatcttatggctaaattctaagagcaaccgcaatgtatactaccaaagtggataataacgtgggcccggggttcaggtggtaacagttattacaaagctcacaatgtgctatgcctattctgcaaattaaggtggggtccaccttaaaaataatcattgtaaaaccatctcctatagccatgctcgtacgaaaagattctcatatctacagaaaatattattctttattgtcttgttaccggcagtagcacaatggcccggtagtagttattgtctctatccacaatgcttcttacctggctataagcttatattaattgcttgttactccctccattccaagttgatctacatatagttttttttaggttattactaaatgatctacatatttgtattcatttattagttctatttgttatttgtgcattggagtaaatggacattgatgcatgcatccatgcacacaagtatttataacccacatacaatatcttgatttgctattggctaggaaacagtggggatgatgcatgcatcgagtttgttgctagagtaaatatagcatgagagagttattagcttttcttggtcttggtgtacctatgaaatatgtagatcaatttggaatggagggagtacctgcttttgttcaacattgtggttgccctaaccataacattgtgggcatggctttaacaatggtccactattcatagggcccaccttaagattacactgcaccataaacattgaggatgcccatagtcacgtgaaatgactattttagttttgctcatggatctctatacactccctcggttcgttgctcgtcggctctagaaggggtttctgtagctgcaacatcaccgcccttcttcgggtctatttgggaagtttctgtagctgcaacttctcatataatcaaaaatcttaagctcccaaaacaaaacttccgcagcactgtaaccagaatatttatataactactttttcacgaagaacgacagtgatggctgaacatttgtcattgtgcgccatagacaaagccggagggcaccatgttaaagctagcacttcttgtagcaacacttatcaacatccagaaaggcatgcatcatccaaaggtgtcggttattgaagacggtgtgcatacggaaggatatattgggggcagttggcagtgtgtgacgtagcaattaccgtcgtagcttctccttctactttttttttatgtagatgccctaaagaggtagagctggggatggagggaacaaagagagggtaagccctgcacacgatgttagcccactgttttttcctcggcgaatgacaaaataggtggctaatcagtgtaaagcagttaaaatgaaaaaaaagcatcaatgtgcgcgacaaaataggtagtattatatctataacaagatacagagtgacatttatggatgcatatccttcgcattagcgtctgcgattacataggaacaacgctgtgcattacgctaatctgagttgtttatctgaaaggaatggatgtgatttcttattcctcatcatcttgctgctcctcatgtttatgggcatcatcttgaaatgctcttcgaccggtagctgaatggatgacactcatctgtctcgctccatgtttgattggtgtctctctaccctcgatgccccgccgctggcagggccatccattcagcgcttcgactttggtgttgtcgcatgccttacctcgacgaatgctggctagatctcgtgacgccgtcactacactcttaacaacccgactttggcttccctgtggcactgcctcggcgtcgttgtctcgactatcaaatatgactagagcatgacgaccgtgccgagagagcaagaagagatgaaaagtttcttttttgttttttattggaaaaaatctcaaagtaatcatgagcgcttgtttttcaatggatgtctcggatacatcataatccccaaaagttgcccctctgcggtcataacactaacactaatgcagaggatccgtgttcgacattcatcataaactaacgactcaagtggcaagcgacatgcagaggatctgtgtttagcttggcggcgacatcctgcgtttgggctctgccgtagttgttagttgtgtagcggtggttttcagccgtttttcctgtaataaaccgtgcaatggtatggtttttgggcccggttttccttataaactaggtcaattctcttcttctaaatataaaagtggaacaaacttccgccttaggtttaaaaaaaagactcaagtggcaagccatcaattttatcttctaactgtggattagatatgtttctcaccctatatggttagctcacattttgtcgtatttgtaacgtgtaaaaaatggtatataaacatcaatgttaaaaactttaatattattattcagttctgttacaaatcacaaatatttatatagggactagggaggtagtatattcatgtcagtgtaaggataaagcatacctcctctatatatgtgggttcacggtatatgaaaataacatacctaatagtatacacggataaaaaaggaaattatcttctcggaatataaggtgttagagtcctaatcgggaaagataaagttttcttagttcgtatcttgttatatttctccgagttctactgggagaggaagataatcttcactataaatacaagacctcctaaaaaaaagaggggacacgccaacagaggcaaatacctatctagacaaacccaatgtagcagccacatagctagacatgagggatctataactaccttcaatctcaccgagttcatgttcgaggaataagagtacactagctgtcgactaggtgtgagacctctatgacgccaagtcaacaaagtccagattaggtcatttcaaacatctactcgtgtgataccgatatataaaagacaccgattttggccaaaatgagtagggttattacctgtcagttaaggaaaccaaacttatataaaaatctatgtctcccatctcggttacctctgcttataccctggtttcaaccattcttatactatacaaataccgtctgcggatataacccgtcgataattccaaatgatggtattatagtttaattttgatttattcacgttattaatttacagccaaaatttcgggtgccccgctaaacagactacacgagtccgaggtagggtccacaatttcgtcccctaatattcgggattttgtagctcctctgaacgagaattttcataatataccacccaatatgcactgctttcaatctggccgctagcaagctcatcctcccccacgccggcgagctcctcctcccccacgcgccgtttgcccgcacgcatctggcgagctcgctcgtgtcgtccccgagctcagccgtcgccgctccggctgccgccatggcgccccgagccatcgccagtccaacctccggcaccgcagcctcgagccgccagagctcgacgccctccgccctcccccgctgctcccctctcctccggcccttcaccgcgtgcgccgatggtggcgacgaatggtcgacggcgcggctaacgcgggcagcgacggacgggcgatggtggggctgacgccagcggcaatggataagcgacggcgcagctgatgcgggcgcgagcggcggcggactgacgacggtggcgccgggaggacggaggacgacgacacgactgacgccaggggacggagtggtacagaacgaagaaaattcacactctagtgatgtatattccgaaagtaatgtgaattgggtgataaattctggaagcagtgcgtattgggtggtatattctgaaaattctccctctaaaccgctcaaatttcacgaaattcgtcaaagttccaatttggaattcaacgaaatttattaaacctgctactaaattaagtcagaccattttctcagtagcgaaaccacttctgtttgctctcccccgatgccatccaccgccgccgccgccgccgccgagatggagccggagcccgaccacaccaaaccctccacctccgccgccgccgccggccaccgcaagcacctggccatgctggagcgcctctccaagcgcgctgccgcccccgccccgtcccaggactcccccgtcgcggccttcctctcccgcttcgccgccgccaagctcgccgccgagtccgccctctccgcctgccgctcctcccccgacgacgcgcagccctcgctctccgccgccgccgcggccatcgacgacctcgaccgcctcgtcgccgaggcctcccactccctcccaccctacgagctccgctccgccctcgccgccgcctccgacctccgcgccgcccacaggctcgccgcctccgatctccgccccaagaagtccttctccttcaggaacaagagcaaagcccccaagaacccaccgcaagatcctcctcccaccttgccgccgcctccagaccagccaaaccccagcgtcgaggcgatcctgccaggactcgggttccggggccggagggacgccacattggtgaaggatctgagggtctccgacgagaaggatggggatttcaccctcgctgatctcgtctcctgtcaggtttacctcaagggcaaatgccgggcgctgcacgttcacaagctgaaggattgccgcgtgttcgtgggcgccgtgttcggctcggtgctcatagaggacgtcgagcgctgcgcattcgtgatggcggcgcaccagatcaggatccacgaggcgacagcgacggatttctacctgagggtgaggagcaggccgatcattgaggattgctgcggcgtgaggttcgcgccgcatgctctcaagtatgaagggattggggaggatttgagggatgcggggctcgaggaggagaccggtaattgggcgaatgttgatgactttaagtggctcagggcagtgcagtcgccaaattggtgtttggttccggaggaagagcggttgcagaccattgacatttcagatgttcaggaacgagagtatgataattaagatgcttgggatggtttgctttcggctcttattatggattattgttctggattggttaattcttcttgatgtttacttggattaagttttggtttattatgagtttatagctttcattgtacctacatattgatgcattaaggattagaagtgtgaaatgatttagtgtttaaacaaagcggtagctcatgagttcatctgtatttttgctggccttaccatcaagagcaaacgccatacgctttgatgagcaagaggcatatgcttgacgttgggattctacgccaagcatatgccgtgagggcgtgaggtacaatgtgctgtggttctttttgttccagaacagttttttattgcactaaggtaattttggttcctgtaatgttggaaatttcaggatgaaagaaaataaataatattctcctcttggaatcaatcttggaaaattatcaactagcaaatccagttttgatatgtaaatccatgcttgttacttctgtcatttttcatctttaagaaaactttttcgtacagttgttagatatatattggaatgtaaatgaattcgtgaagtttgagttgttatattcaactatacagtggattcagagagacagagagtggctatcttttagttttatagtttagtatgggcttagacaatataatgctttttaaatttgtattataagtgtgtgcattctcatgaagctctgttatgaagatcttaaaagaaggaagtgagcaagtgctgagtgcattgtaaagacatgccaccatgatattacatggtacaagaacatgtctgatttggccttggcattttcatattctgattaatctcaccaaaacaggaccaagttctgctaatttatctggtcttgtaacctagagaataccaaaagagtgatggttggactgcaaattacataatgtgcatcatggttgtaagcaccttaaggtctataaataccagtgacttgtaaaatataggatgggagtgattctgtggatacaggagtttgtcaaggcatgccagaaagggttatattatgcctcacaaggtattaattaagcatctgttcttttttttttaacccatgtatgccatttgtttgaatgatcttctgaaagagcatttggcagtagatgattcagaaaaaaaaagatgctatacaatttcttgctgtaaacatgtttacttgcttcatgaaccaagcatttgcatcttgcagctgtgctgaactggtctaaatatgtttgcagacatgtggtttgtcatgagctcttgctactctctatcattacactgattctggagagttaacatgctagtagtagttattagtcaaataaacttctcaggaggatatgggggcgatttaatcatatctctgcatggtttgacgagtatggttgttggaaatgctttgattcacagcgatgacacttgtggcaatttatttcaccattcgattgctttgatctgatgcacgtttaggtttggaggatatgcaccaaaattcttaattcctctggaataaacactattcgtgtattcgtttcataggattcaaaggaaaaaaattccataggaatcttgtgccaatcctccaaaatgtattgattccagagttatcttccttttctttaatgtcttttctcctaaacaactgagggctcattcggaacataagataggaaaaagtaagaatatgaaagaaaatccaatgaaaaacaaataaatacaaactagaggaatataaaggataagaacaatcagagcacaggaaaaagtctcaaaggaaatgcacagtaattgatttcttccccatcgttgctatccactcaaactaatagtaccaccttcatctcccccaaatccaacacgaaccggacggcatgaggttagggatatcctgctacccgtataaaaatccgtttgtttgtttattttttacatagtagtatataagaaaaaaattaactagaagtgagataagcggactaaaaaatccgcttacccgtcccacttacatccctacatgagctccagcgctcggggaagcggcagcgtggcgatgggctgtggcgaactccggcggcgtgaacagtggagcagcccgtgggcaaggctgccggctaacacaaactcgagcttgtgaccagctcagcctgtgagctgtagtagctgatgatgatagataactcgagagaaaatgattggaagtttagacgagaaaattaatgattaatatggaaatttaattttttaaggtctaatttgttggtatagatggtagtaactgataagaagtttagttcgaatttggatctttaaatgaaaagggttggctaaaatttatttaggcaaagtatagagttattccgttgcattaccactctacccgcgcattgaaaaggagagagtttctccctcaattttttttatctatatttcacaaaaaagaaactctcatactccctctgtcaaaaaaaaagatccaattctactccctctataaaaaaaaaatccaattctagagatgaatctaatattcatattcatacctagaattggacctctttttttttgggggggaatggagggagtatctcccaaccaaacaaaatattaatagccccactcctctaaattctgaatccttgttaaaaactcccaccgaccataggaccatgggtgtttctctggtcttgtgctgatttgtttttcttaagagatggtttttgctctgataatggattaccaactatgtgattgcgtgatttccacggtcttatacaaagcaaatgaaaaaaaaatagcttggggtggatggaatttttcctgtggttttcatgtgaaatcagcatggaaggaaactttcccttgattttttcctacaaccaatttcttccatccgaaaggcgtgttaaggaaaactcccactgataagtatccctccaaaagccccatggaaatcgacttatagggtctctttaatatgtttgaaatatataggaaattcgaaggattatcctataggaaaaatatgatgaaaccccacgcgatgctgcgagagtttagtatcatagcaataagtataaataatgtgtaaaataactagacgacataagcttacataaattaatatggtttatgataatttaaatagtatatagaatgataataaggtgatatggctttcaggctttatgagagaagaaaaggagagatgtaatttgggctatagattaatcatctgagggtttaaaaaaaagagatgacatggcttaatgagagaaaaaaaaataaggaagataatttagaccatagattaatcatctaaaggctagaaacaattgatgtgctacggtttaataagaaaagagagaaataacattaaccaagtgaggatatataggatattataaaaaatgatggagagatatgtttaaatatatgaattatgtgagatgataatttaacatatttgcatttcatagctctaatatttaataaattattgataatatagtatgcttgtatagtgtttaagatataataattattagtggacaataatgtgacatctttatacgttgagtttagaatttaggtaactttacaagattcctataaaaaatttaaattaagagaaaatccaagaaatatcattaacaaatatccaaattttagaaataccattgataaatacatgtttttataaaatagcatcgtacaatagctctgtccgaaatactatcaccactagagttccgttagcagccttccattaagtactacaatatctaattcttttagaacgactgcggactggacgcgaccttggcacaaatatacttaattactcttgggtggatatgacacatcgtactactacgaatatggacaggtgtaagttcaagtaccttaatttagtattggtgattaatgataaatctaattatatgagactaacgtttttatgagcctttctttgactagtctcatttggatatgaaaataaaaatgatgagatgtatgtattaaacttcacatattctaacttggtctctcttgtggatccaaaatatagtgtgagctccctcattaatcttgattgattatgtgcatatgtgttcctttatatccatatgtatgcacatcttgagggggagcttattctatattttatttattataagatttctatcttgatttgaaatcatctttcatcccatctctctatattgtttatatcgggttattatccatcacccaagagagaaaagattgaaagatcttggattaaacaatttgtgtaattgttactttcgtgatagatgataaaccaatgtttatgggattaacctctcttttgcataagttgtctactaggttatttcccgataatgagatgtggaagacatgcattctattgtgatggaccttaatcatgacaaggatgaaatgcatggagataaaacgatatgtaccacttcttatctcctactttttgataggttcatatatatgatttccatgttattgatatataagtgtgagactaatgtttactcgagccttatcttatttagtctcatttacattgagaacatagagatcatgaaggtatatgttttatgttggtctacatcattactacatatgccttctctatgtgtataggataaacccccattggtcattctctaattatgcatacacttgcatctcttgtatatttatttgtatgcatatatttagggggagcaaatcttatacatttattgtgcatgttttagatccatgttgttcacctattatttatatcggatctttgcacttgagcttgcatacgagtatatgacacttgtgatgttaatgaattctcaacaaacatatccatatcttttatatgcaaccggttggtcatcaagtgaaggatgataatcgatttgttgagactaatgttctccttttagatgtgaaaaggaataggtcccactacgatgaggctaatgaatgacaccatggattaatggtaaccaagccaatgacatcgtcatgttggcaagaatgaagtcaagcttgtgatgagaataaagtcttgacaaaggatggtaaagacctcggcataaacatggttcaatcggatggtcacaagtgttgatcttggctcaagcattgaccccaagttggatggcgcaaggcaaaggtataatagagctaagaatattttcttagtcttttcccggtcttggtgtttggtgtagaccggatttgctagatagacgccgtactatcaagaagagtctatgaagcgagcatgtggatgatcttgcgccatattagttcatatgcatgtaggtgtatttggtgggcttgtctagccaagtgtgttgagttttctcaagtcctaaacaaagagagaagtaggcaaatcctataggtttgggtagcctcatgtggttatgtccggtggagtatcctttggggtgtgagccctttctccctgagaaaagttgtgtttcttggatggatttttcatgggttggatggccctttgaataagctttccatagagtccaagaacgtcaaattctgagatccgagtcaagagatatcgccgttttactaacggttggttgtgctgaaaagtgacctgcagtctgaccgtaggccttaggacggtctgaccggatctattagccggtctgaccggcgtggtaaggccggtctgaccggccccactggtctgttgcactggtatgatttttggtggcgatacagagccgccagagccgcaaccggtcagaccgagccgacggcggtctgaccgagccatggacggtctgaccggctactacactgcggtcagaccggctaggttgagtgggctcaatgattgccctgtaacggctagttttctagtcgttacaaagtagtccggtttgaccggccactctattgcggtctgactggtagagcacatagttggggatttcgactccaacggctagttttgatggttgggggtatatatacccactccccagcagcaagggtaaggttttggcactccattgcattatcttgaacccttgcaagagctctcacactcttgtgcacttagtttatttagtgaggtgttggagagtgagttaagccaatccaagtgcattgcttcattgttagagctagcgtggcacttgatcatcctcggcaagcatcctagacttgttactcttggaggttgccgcctcctaaacggcttgtggaggtgttgcccggtgacctctccgaggagattgtggaggaggcctgacgctgattgtgagtggtttggagttcaccaccttcggagtgaaggaaaaactaccctagtgatcgaggcttgggtagtcctttccgtgggccggctcccaccttgcccaccccttgacgaagggggcgtgcggtggcttcatgattgagcggtggagttgtgctcgcctcaacagggattaggaaaccggcgagtttccgaacctcggtgaaaaatcccttgtctcttgtctcatttatttgttgcatttacatttgagcaagtttacatactagcttatttgtgcacttaacatttgagcaagtctattatcaccctaggcttgcaaaccttaacataggctagcttctttatgcacttacttgagactagttgatttaggttttgaattgtgtaaaaccgttttgatttatgcttccgcatacaaatttcggttttagccaaaagttttaaaaccgcgtattcaccccctctagtcggcctccttgatcctataacaggaagatgcccttcaattataacaggaagatgtccagattcataagtattaagatgtgtcatatccagcgtttacaactccgagatgcccttccgtttcgggctctggcagaataacggttttcgcgaaatccggtagatcccgaacaaattttataaaccaaaatttaaatacaaattctctgagtttaccaataagctcgcgaaaactagtcggctttggagaaattccaagcgaaaacattgaaatttcaaccggtaactaggaaaagaggtaaattgaaagtgttttcttttttttcattcgctattattttctttcctactataaagttcagttagtacacggaatacatcaactttttcaaaatttatatcctaatatgtactatgaatatcatactatttgtaagattttatttgattttcttccttattatcaatttaaatttgaatttagatgaaactaatcaaaatctcagatggtttctactttcgaggctcgtcgaaaccttaaaatttaacggaattcgatcgattttcgttggaattgttaatcctagtcatatccacctaaaaatccattatattttgggatgggaagctggacgaaacgcgaccctagcacgaatctgaacgggaagctgacgacggagatcgcgcatgcgggtgccacacggcccttgccctgggctgcctagtccagataaaaaatacggcacgatacgtacacgtataccgtatatacgaacctacttatacggtacacgcgtcaattaataggagacgaggagagataaacccccccgtattcgcaggctcatcgacttctcgtcttcctctcctctctctcgtttcgattcccccgcgagagattcgatccaaccaaacccacccgctaccagcgtcttctccttcgcgagcaagtaattctctttcctcctcctcctcttcctctctgccgtatttttttttgttttttagtttttttttcttcttcgcttccttcgccgccgtcgcgggttcgtctaaaagtccgcaagattcgtcgtcgtcctatcgccggtgggtagggatttcgtcggcgctgctccggtctgctgctttcgttcgttcgttcgatccgatcgatttatttgttcctggtttgggtctcgttcgattgactctagtaaagtctattctttttttcttggtttcctggtttaggttatatggagagcagtatttaggcgtttaggcttcagagatttgtttgatattaggctgatgtcgtgattcatgaatcatgagtagtttcctgcgtttaggggtagcatcactatgcggtactgctgattggttttcctgcgtttgtaggatgagattggcccccttgcagtctgtaggataattgcatgctaatgatatttccacccctaaaatcttcacttcattccaattcaactaccaagtttttttaattgttctcatgaattgcatgctcatggcttgaagacgtcgagtctttcctccttgtttttctttaattgcgactccacctaatctaaaagattcaatcttcaatgcttgctttacttgatggtttgaaattttactgtgctttgtggcgcaaagcggttgactttttagaggtttgttttacctattgcctattcaatctactgtgaaaaaaaaatctagctttatatccatgttgtgattttcttggggtttgagttgttcaatatagggagaggtgcttaatttggtttttttaaaaaaaagtttattgtgtttcctagacaatttagtgcaaggttacagactggtagcttgtaccctagccttggtaggagttacggtttaatcctctaaataatttctcatcgatgtacttgtggactgtctatgattggatgtatcaaggttttaccttttgtgtattatgcaatatgctggtctggttttcttgagcttgtgagttgtgattgtggcttacaacgagtcccttcacatatgtaagatctgtgatggaatgttttagccgcactagcggatagaagaacgggaataaaaataacaaacaagttgggacattatgcatcttatattatatgtttgagtcttttgtgtggagcattcactcaccatagtaagtattctaaacaattaaattcaacctatattaaagaaagaaaatattttagtaaattagtaaatatttattatttataaagcttttcacatgtatgcattaatcttctaaacaggttttttgagagtttgcaatgggaggaagcgaatacgatgatgactgggagttgcctagcgctgacatcactgtagttctttgcggcaaacttggctgtggcaagagcgcaactggcaatagcatcgttggaagagaagcatttgtatcagagtactcccatgctagtgtgaccagtacttgtcaattggccagcaccgcgctaaaggatggccgtaccctcaatgttattgatacgccaggtaagcatgcatcaatttattctgttctgaccttttgttttctgtgatgactattcattgttgttactacatattcatacttgttaatcttgtggatgttttgaatttgcgttatctatatttgatcttgtgccacatttatcatctattttcttgctatgttattatgatgataaaatatagtcatgtcgaaaatacatgttaagatgtttgacatgggctttctgcctacctgaacttctaatgctgctcagacttctttgatggatgcccttttcttgccatcatacttcacaaagtcctatactccattgcaatggtggattcaggatttctatccttggtgtgcctcatggttagccagacttatgcacaatatataacatatactagtcttagttgggcactttttagtagcatagaaatgttcgattaccaattcgagaagcaaatgaccaacttgtaaatttcatgtttctttgtttgaacaagcttaatagacagcttccaggagattctttaatgttctcaatttgattgatacaacttgatccttccttgaatttttgaactcccactggtttcactcgtttcagttttcaacttctcaatctatccccgattatctgataactgaaaattcagagagacataaactagaatcagtggagggagtgcagctaggctgaacttgtacaaactagggggcggcgcctggagctggacccctgttcggcatccctgcgcagccgcagcggtgtcccaaccatcaaccgtcaatccatcatgctctcctcgctgcaaggctgccactgcagcgccaccaacaacgaacagaaacgccaattcacaaaccctatcgtgagtgccgactaccaagtgaagagccaggaggaacgcaccacaccatccacatgtctttgctctgtgagctgtgcagcgcctgtgcgggcctacaagggagagaggctcttgtgctttggtttgtggaagcacacatcgaatatttcagcaatgcatactagtacatggtaggaaaaaatggcattttttgggtatgccggtgcataccgggaacccccgggtccgccccttctccattgcagtaaggattttttttttttggtgatgttttgtgttgatatctgctaatagatctgaagaaatgtgacagtgatgttttatgagccttattgattcaccaatttaccagttgtatggagaagcagataagcatgcactgcaacacatattcattgcttcatgattcaagtcctcctaatagtacttgagataatgctctgaatactactatagataataccataaataattaggagtacccaacttcctctatttgttatcctttgtcattccatatttcatgcccaaaggccaaaaaaaagcgtcttagttgcaagaaaaaaaacaaatcataacagtgtatactgttaagtattgtcctgctgcatgagagacgatctcgattgatgttttattttgtgttttggctaatcacccaatccaagtcagatgatcattgacctttcccccttttttttttgacaacaggcaaatatattgaccttttccattttcatattggtatttttttggctaattatccattttaatatctctaataggattatttgaaatgaccattacatctgaggatgccggtaaagaaattgttaagtgtatgagtatggccaaggatgggatacatgcagtgctgatggttttttctgccacatctcgttttactcgagaagattccagtaccattgagacaattaaagagtttttcggagagaagattgttgatcacatgatactagtatttacttatggagatttagttggtgaaaataaattgaagagcatgctgaataatgccccagagtatctgcaggtaacattttttttttgttgaaacttctatgcacatgctaaataataatatcccgatggaatctgcaggcgggatttcaattttttccgcgtagaatataaagtgcatttgatgaaagaaaattttcctcatgagcatggttcatatactttatgtaattacatatatgtgttttatttacagaaaactgttgagctatgcaaaaacagagttgttctctttgataatatgaccaaggaccgatggctccaagagaagcaacttgaaaatttgcttgatgttgttgactctgtgaatacaaataatggaggaaagccattttcagatcaaatgctcgcttgcattaaggtaatagtacttctgttttgctgttacttttaagtcaagtttcaatctttatttttatcttccatatacaggaagcacatgccagagaacaggaggtgcatgatgctattggatatacagaagagcaaatatctgaattgaaaaaggagatccagagaactcgggatgaacagcttgcaaacattaccaacatggtaagtgcaactccatgtagttgaactgttgaagaagagcatatgtgtgcttatatcatttactcaagcagtagtttgtattaaatatatacatttaaatagtctttcttgtgttgtataaacttatcaacaattgtttacaatggcattatttcttgcagcacctttattaaacatatcatagcattctaaagaaagcttaggatgtaacacatctttcttttatttttaggtcagttacaggatattaaacttatcaattttatttgtttacaatggccctatttggagaactagccaagagttattttgagagctattttttagcacaaggaaatatccctccaataaaatagccctaagttgtttggatccaagggttattttgagagctatttggcctttaatgtaccttcccatggagagagatagagagaaaagacactttttcagtgggccccacatgaaatagccccaattagcaccccttgagtgtgatagtttttttttgggtgggttatttccaaatagccctcaaatagctcacctttttggatctttttgagctatttaggctatttgagagagggctaaaaaatatcccttggatccaaacagggccaatagagatttgtttctttggagaaaaaaataatctaaaactcatgcaaaatagcttgttatcttcagttttgaaatgcattatctctgcttccagccatttagggtgtgtttggataatgggaaatgaggggtgggattgggattgggaaatgaataaagggttaggattaaatggatgagggagaatgaatgattaagatttaaagaagggtgggaaatcatttcccttagacatttgccaaacactgccttagaggttgcaaaacatgattgcatcaagattatagtattacaacttgttttaaaacatgcaaaagggaattctgaagtgtacaaagatggttttaaatagctatttaaatctgttattcagaaacatttcttctatatattagaattccatcaaaatttcattgacttcacatgttcataggtggaggaaaagctgaatatcactgttgacaagctgcaacagcaactcatggaagaacagaatgcaaggctagaagcagagaggttggcagctgaagctaggctccgatcagatgaggagatccgcaagctcaaaaagcgcctcgagaaggcccaacaagaaaatgaggaattccgaaagatggcttctcaacacaagtgttctattctatgagtagctttctcctaggatcaagctgctgccatggttgaatgctccgtgcattgttaatagagttcagaacagtgctctaggctatgtggttgacataaaacttttgctactgggctatctcatatctgtaaatatacaggtatttggatttttaatgtccaaggattttgactatcatccctgctagttcatccttgtgaaaagtgaattttggtgatcgtcttcttctgaaaatgatcgtttccacaagtgttgcaggcaagggatcaatgatcacctccttatctgcctgtgacttatactttcatggtgataactgacaagtgatgaactgaatggtggatggtataccaggaccatgctagaacaggcttatacatgcgattatttgtgtatttttgtccggtttgttttcattgttaaattgccattctgccaatatcacagatttttgtaagctaaagtttaaaatagcactggagagtatcacatctgaattacatccctgcaactgccatacaagcactacgtaagctctgcatctaaatttctacatgttgtaaattgggtgagtttgggtcactgtaatcttagcatctgcctttaaaggcaggtgactttgtttagttatattaagacgaacgaaagttatatttgtgagatataaattattttgataatatgacatgttttaagtagaggaattatagtcattgagaaagtacctagtaacaccttgagatacttaggctatgttcattccagtgacattgggtgagaaagctcctcgttttccgcgcgcacgcttcccaaactactaaacggcgcgttttttgcaaaaaaattctatagaaaagttgctttaaaaaatcatattaatccatttttgcaatttaaaatagttaatactcaattaatcatatgctaatggcccacctcgttttgcgtatcttcccaatctctctaatccccttctcctcaaacacacccttagtatatagaggtaccaaattttacataaaaaaatatggtacctctaattatcttctcaaaaatagtaaaattacccttttaagtattataaatttctgaaaaatataagttagcggtcaaagtttaagctcaaatgatgccacagtgccattattcgagaacttcatctgtctaaaatacatgcatatttcaagggaaaaaaaatgcaaatttaggagcctcttgggtctccaaaggccgcgccactttggcccatgaatttagttacggcccacggtcgcatctatctatcaatcggccacataaatattgtgtttatcttatttttaacgaccaacatataccacaatgatttattgaatagaggaggaaaaaactacaatactgataccctggaaggcaataattagaagagaaaaaaaatcaccaccaccacacaccacgcaccgacagcgtctataaagagttagtaccggaccagccaccgctagatctatcaaagacaacggctataaataatccgggagaaggttagtaacggaccagccgccgctagatcaacaaagaaattattgccgaaccatccaaaactaagaccaaatattgtgtttatcagtacacgaaaatgagaaaaaaaattgtggttagtccatgcaaatattcaatcgctcgctggctgcctcctcttggttggcactgcccctcgattccccacaccaacaacatgcatggatgatgatggatcatccaataattaatcatctaccagaacctcgttattgataaattaggatgttcaataaactatattaacatgtcgtacgatcgaactagtataatagtaataatagtggtggtagtagtagtgccaatatatatccactaggtagcttggtgattagtgattaatctaatcacgtcacaacaaagtggcaaaggcattaaactaatggtgtactcctagtcacacagcatgtgtcgtctttgtctccctctccttgcctgttcttattttagtgcacaataatatattgttgtaaagaaaaggctgaatggtgccattatattttgcctagaaattatgacgttagtcggagggaaaaaaattgaaaagcttgttcctgtgatcatgataggtactttctctgttttaaaatataaatatttttctaactataaacaaattataatggtgtagattgacaataattgtaaaacaagtcacactttgtatttgtcgaaattaaatgaaaacaaattaatgtatatatatatatatatatatatatatatatatatatatataaacacaatctacctccaaatgaattctgatagtttttgagcgagttcgggtacagtttcaattattagcacttttttttttgcgagggttttgtggattaggtgtgctatcacgcaaagcatgttactacctaaatacttaaaacaaatgagtacaagaaaccatcactttgtctccacagatacagtacagccatgttgtcgttttaatcaattaacaaggttgcttgatttctgcacctccaagatgtctccatacagtagttgaatcctgtgcaaagatctcgctgtctcgagcaaaatgtcaattgaatttgaagcaatatttgaacaactttttttttttacaaaatccttcctccttgaaatttctgcttctaagaaagacaatctcaggaagatccgttggagacagtgagatctcgccaagtttatgatccattatggctgtgtttagatccaaactttggatctaaactttcaactttttccatcacatcaacatgtcatacgcacgcaacttttcagtcacatcgtactaatttcaacctaaacttccaaatttggaaggaactaaacacagtctataccccaatcctttaaggtgtacggttcaacagacaacgctacactgatgctgctgtggatacagagagaattagagatctcttgcactacaactaatagcctgattattgtcgctactactagtagtagtaggtatctgctaaactttgtaaattttcggtcacctaaaattacacatttctaagtctaaaattacggtgctattcaatgcaatttaatccattttatcggcatggcatctgtttttgtcacattattttacccaagtttgaatatttttgtatgcgattttttaaattcttatggattgtaaaaaaaattcatgttttcttagaattgtttgctgtttaacctttcatataagaaaaaacgactttatttaataacagagagtgcattataagaaccattggattatcggactagagaagtgagagtaacttttgaaaatttcatgcaactcaaatctaaacactctcaaaatattaatacattctccgttctaaaatataaaaaaaaattgatggatgagatactttctagcatgtatctggacaaagttctattaggtgtctcgtacgtttaaaatctcttatatttcgagaaaaaaggaaatactaattaaagactctgccttgatttccttggagctttgcttgtttaagtagtaaaactaagtagcactacttaatttgggggaggcatcagagcaggcaagatgcgagaaaaagccaggcaggggcctcgctgaaaaggaaaggccatcgaccgaccgatcgagggcatgcccgggtagggagacagacaaccaaagcagcagcaccacaacctcggtcgctctcaacacggtcttgcccctgttttaggtagctaaaaagattataagaaaacaaccgattgttaatcagcttcttctgataatttgagaaagtcgaaagacctatagcttctcacttctattttattttcaggattatataatcagagttttcacagaatctgaataaaaaaaaaagctaagtttagaattttacaaccagttgtaactatcagaagtttctccaaataaggcattgtttagttcgcgaaaagaaaattttttagtgtcacatcggacgtttgaccggatatcggaagggatttttggatacgaatgagaaaactaatttcataactcgtctggaaaccgcaagacgaatttattaagcctaattaatccttcattagcatatgtagattactgtagcactcatggctaatgatggactaattaggcttaaaagattcgtctcgctatttctatgcgaactgtgcaattagtgttcattttatcgatatttaatgctccatacatgtgtacaaatattcaatgtgactttttggggaaaaaaattggaaactaaaacaggagagagaggagggattgggattcggtgacattcccccgtgacattctcggtaacattgagtcactgacatgttggttcaggcacatgtcagtgactcaatgtcaccgagaatgtcacgggggaatgttaccgaattcaagtgattcaatgtcaccaagaatgtcacgggggaatgtcaccgaatcctagccctgagagggggaggggggtggcatgtactgtactccaacgtggtacatgggaaaaggaccggccgcccggccaccgattctttcctgttgcatcgtcctccattattccctctgtcactcaccccaactccacggctcccattttatgctgtgacgttgggccaaacggcaaaaaagcttaagccaacgttgatgccaatcctaatgaatagtggaggatttttttttacctgctaataatctttaatcattgatttattttgactaaccgtgatgtgtgtatgagtcttttattcttacaaagtatcgttatcatcagcctatgcaccgctaaggcgctaaccaatctaaagttgtatttaagaggaagggaatgaagagatacacaaaacaagatgaacggtaattgataattgaatattaattatattaaacttcgaaatagattaatacgatttttaaaaatgaatttcctaaagaatttatttaaaaaaaacgtaccgtctagccgttcgtaaaacgcgtgtgcggagaacgagatatttattctctctatctatctgctgcaatcaaactcagcctaaatgttcttatcgcttttttattttctagctttggtttttaaatcgctcgtaaaacaatacgtctaaccatattttgatagacaaaaaattctagaaatggaagcacacccacggcatcttcgctgcgaaacggttttgtcaagccgcggtcggcccatatcatccctcggcgagctacacctacacttctcccgacgaaagaggaggtcgatgacaggtggggcccgcaccggcgggtaagacgcggcgcgggtagcaaaaggcccgggggcatttttatatcgggtgctttacttggaatggcaccgcgcgcggtggggtgccgggccggcaagggacatgcattaaactaccgcccccacgccgctgacgcgtgggccccaggcactggcccacctcagacgccgtaagttttgacggcgtttggctacggcgcctgtgcctttgtggcggtcacggagctgacgccgtcaccactcacccccggtcaaactgtaaaccttgttgcaaagaggaaaattaaaacctggaaaaatgtacgagtaagtatatactccgtatattccagtacagtacagcgtccaggtgcgggtgagtgtaggacatgaaaaattcatgtggtagtttatgagggtgtttatggataagggccgtgtgcccgtgccttcatatccatagttgtgatgctgttttcgtttttttaaatagatgatgctactactttttataaattattattttattatgagttgttttatcatttaagtactttaattaatacatgatttatataatatgcatttttacaatttcttttaaataagaagattggttaaatatttgtccaacagttaatgacactatctatatttttttttaaaaaaagatgagagtactttttctaaatctccttttctcgtcgtgacagagctattttttttaagcccaaacaaatctaactaagtcgtttatcatggaaaatatactctcttttttctaacatggaaaatttactctctctcttttttctaatcattcaaatttcctgttgaaactaaataacgatccactttaagatctccagatttcatgaaatctagattggattccaccaggattgtaaaccttagtcacaactacttcttcaacaaaaacatccacatgaccgctatggcggtattatagaggcggaggcaaacctaaggtagcttaggcttgagctcgaagcctgcttatataatcatgtttttttaagactggtcaccgaggagtataacttgttgaaatcctaattaaatcatcatgtaatttaccctaaaaaaatcatcatgtaattttttagggaatctttacctactaagttaaaccctacttaaatcttaaagctttgatagtttctacgtttgagccatagacagaggagatttatcttattcttcacgcacacactttccgaactattacatggtgtaaatttttttaaaaaatctatacaaaagttgttttttaaaaatcatattaatatatttttaagtttaaaataattaatctctaactcatcatacactaataactcactcgttttacatatattttagatgttctcatctctcttctcaattagttacgtctaacagatatatactccctccgttctatcataagtacaaccataaatttccgtgttcaacgtttgaccatatgtcatatttgaaaaatttatgaaaaatttttacaagttaagtcacgcataaagtactatttatattttatcatctaataacaataacaataccaatctctatctctactattataaaaattgaagatgtttttgccgggattttgatacgtcatccgtgtttgagttggtttctaattttatctttatatctttttttgtccgtttatttttttttcgtttctttttttttgttccgattcgtttccccccccctttttttgcttttttcatccggtttcttttctcttttttagttgttttttccatcctattttttagccggttattttatctcatccgatccgttgcacgccgccgccgcttgaccaaaccctagcaccgtcgccacttccatatgtattcccatgcattttctgctccaattgactgcaaaaatggattccccacttatcctcatcattttttctcacaatttttctttcaattcagctttaattcactagatttagtcttagtcgccaatgatagccaaccaccccttttatctcgaattttgcggattcgttctgatttcgggaaaacggaaagaggagatcgagtggatcaaaaaccctcaaccaatttatatataaaaaaaattcgcccagaggatttaatggggaggatcggctccggcatattggcacaagactatcttgaggttgaagacgacagttgaatgtgcgagctgggcctatagctccacttgtgggcttggatcggagagagtcaaggccgtcggctggatcggagagagtcagggcaattgactgtgcgagctggacctgtagctccactcatgggttagatcggagagagtcaggtgagggaggtagtggactaggttatgactgaaaaagaatggatctttcgggccaaacccatgaacattttttattaaccttttcaattataatgtacatataatcattctaatgtttcaattcatcgcttagttcctaatagcggttgtaccactgaaaaatgtttctagctgttacaacgcacgagcattttttctagtcataaaaatattttaaataagatggatggtcaaaattggatactgaaacctataacagcgcttattataggacggcgagagtatatgcaaagacgtgctctacctaccaaaaagaagcagctcgctgggccggccgaccggagcattgcagcacgaccgtacggtacgcgagagccagccggccatacataaaccggtgcacttatgggtgccaaagtacgacgacccgcgacccgcgcccgtgtgcggatctatcggatccgggtctctctttttcgtataagtacgtgtggcgctggaccccaccaccgtcctgtctactcctactgtttttactgtccggccccacccgacagaggatcggagaagcatagctagtactaggcgcgaacccgacccgacccgtgagcctttaaatgaccgcagttatgggctcatcaatggcgatccagcgggtcgtcgtgacgtggaaaatccatcggtagccgtacgtttcgatcagcttcgaaaattaactggagtagctaacgtcacgcatgcaatggcactggcacacgtactccttctgtcaaaaaaaaaacaaaccctgaatttccgtgtctaactttaaccgtccgtcttatttaaaaaaattatgaaaaaaataaaaagacatcacgcataaattattaatcatgttttatcatctaacaacaatgaaaatactaattataaaaaaatttcatataagacgaacagttaaacgttggatacggaaagttagggtttgtctttttttttggacggggtagtattgcaaaactgcatgcacaaacgacaagttaagaagtagcgaaaatatgtgctgcaacgttttcgctggctatgtgcaacggttccaaacaagcgaccagaataactggaaaaagaagaaccgaagaagaatgcgtgcatgaaatgtgtggtgtggcatttgcatgcaccatatataaaacagtttaacactacatgcccttaggccttacgacgtgtttgacaacttacggggaagaagaacaggagctgagcttatagagggagatggtggaggtgttcatgagatttttatttttaatcaccgtccttgtttagttgtagagatgataatcatgggaagtttaggtgagaatcgaattttaagtgactgatatacaacctagatttatctcttcgtatttctaaaaggaatttcaaaactttcccagttacctacccctaccaagatacttccttcgggttgataatacttgtcgttttggacaactttgaccattatttttcattataatatgtataaaattgttaacaaatatatgatcttattaaagtacttcttaagactaatctatacatgtagtcaccatatttgaaagataaatattttaaaaatgattcataatcaaagattctaaagtttgacttcactcttgtccaaaacgacaagtattatcagcccggagggagtattaaaaaggcaaaagttcgtaatctcctctttctaatcccttctaaggccgagtttagttccaaacttgttcttcaaactttcaatttttccatcatatcaaaactttcctacacacataaacttctagctttttcatcacatcattccaatttcaaccaaactttcaattttagcgtgaactaaacacaccctaaaactcccacatccactatccaaacaacgtacttccccttaaacacacctgcatgaacggtaaagccaagccaagacaatcgtcgcaagaaacccaacgagaaacacctaggggtctttctgctagcttcacaaggtagagggttagacgacataggtttgaagcctcactccttaatattagatcattccatgatatttgcgtttttttttcgagaaacccaacaccacggggtacactcaccgcgtagccgtagccgtttccattagcccactcctcagtcctcacggcagatggaccacccgcagcacagtaacggctaacggccggcagccgttaccgtttccatccgctcacgcctttcctgcctcccccgaaaactcgcgcacacatccattaaaaaaaaacgcacaaaaaaaaaggagaaaaaaacgtaaaggcagctgcgcccagcaacaaacccacccacccgctgctcccctcccctcgcctcgcgccaactagtggagtactaggaaaaaaaaacacgagccaaaaataaaataaaataaataaataaataataaaaataaaacagcagcagcaacacaccccctctctctcttcctcttctccccgcgcaagccaaagccacagccagcgaaggcggcaagccaccaccaccacctcctcctcacgccaccgcggcctcctcctccggccaccgcgcgctcacctcgggcagcggccgcagtggcgcgcgctctccggtgtgggatctccgagttttttttttcgttttccctctgaattccgcggcggggaggccggatctgcggggaggggcatggggtgaccagatcgggacgcgcacctcgctctcctcctcctcctcctcctgaattcctctcgtcgggatggctggctccgtcgttgctgctgctgccgccgccggcggtggcacaggttcgtgtcccgcgctttctcttcgcgtttttcgcctcggctggttgtgtgtgtgtgtgtgtgtgtgtgtgtgtgtgtgtgtgtgtgtgtgtgtttggtctgaattggggttgtgaagttagctggtgagtcgagtgcttggtgagctagcaagagagagagagacgtggacttggggggcagttgacttgttcgtctaggggggagagagagaggggttgttgtgtggtgtggaattggttggaattcgaggcgactcggcattgtttaccataaaaagcgccttttctcttccatttcttgtccaattttgtcgtcttgttttcctttttaggtcggagatttgttcctgttgtgctgattcgtgcgaaaactcgtaattccgctagtatggccactgctctagtaattctcttcggatgcaagcgaattccgatctgtgaaatgggggaaacacatgtgcaattacggatctgagaacctgttttgtagtgacagcgtctttgtttctctctcttttttttttgaaaaaaaaatggttaggttggcaattggttctaccacagagacgcaaatgagaaaaatgttggatctatgtgtgtgctgcttgtttagatttacaattctggagcaattatggtgtagttaactcatgatcaacggttaattagacctttttggttgccaccatgacatgaggggaaatttcgcttgattttgtatggtgatgtttttattttcctaaaaaaagagagtaaaaattcctctgtgcagggagctcttgcgatgcgttgtacagggagctatggcatgcttgcgctgggccgttggtcacagtgcctcgccaaggcgaattggtttactacttcccccagggccatatggaacaggtaaatctcactataatatatcaatgcttgcttgctctctatcatgtcctaaaattaaggagtttgctactaatttgtgccataagaatgtcacttgttccttgtgttgacacacagcagtatggttttgtttcttcggcaatgtagttattttagtacgtctttcctttgaactaatcttatgtctttcctttgaactgatcttttcatgctttttctatagcttgaggcatctacagaccaacagcttgaccagcatctgcctttgtttaacctgccatctaagatcctctgcaaagtggtcaatgtagaacttagggtaagcattttccttttctggtctgcagtagtttcacgctatatgaaagttcctctggattttctagcaagagtattacttgtgtacctttcatcctgtagtttactcaccttttttcctctggtatgcaggctgaaaccgattcagatgaggtttatgctcaaattatgctgcaaccagaagcagatgtgagtatgcttttcttatatatttttcttctaaataatagttgtccttttcagctcatttgagctttttatcaagctgtaatgtagtgatcttgctcatgtcatagtcctttctttcttctgatcgtcttctctcatattctcacataaattctattgccttggaattttatatgggtatgtacttattcattttcctttattctgttgttagcaaaatgaactcaccagcccaaaacctgagccacatgaacctgaaaaatgcaatgtccattccttctgcaagactttgactgcttcagatacaagcacccatggtggattttcagttcttaggaggcatgcagaagaatgtcttcctcccctggttaggaccaaaaatatttttaactcccttcatatgcggataatcacattggatatttgctatctgtaacatcttctgtatgtggtatggtttatctttaggacatgactcagaatccaccatggcaagagcttgtggctagagatctccatggaaacgagtggcatttccgtcacatctttcgaggtaagttataggaagaacatagtaatagtgaatgtagttccttctgagcttccataatgaaagggcttccccaaaagaaattggtggcatattagtaatgctttccatggtgattttgttactatgtctcacaaagggtccccccaccactcccttattttaggacaacctaggaggcatctgcttacaactggctggagtgtttttgttagctcaaaaagattagttgccggtgacgcattcatctttctgaggtatgcaggggaacatttggaaggcttgaagccatttaacacattttgcttatttgcgtttgtttcctgggtctgcggagttcaggatgaatattctatatcactattgctgttgtaaatacggtgttcatataacagaggtgagaatggagagctacgagttggtgtcaggaggctcatgaggcaactaaataacatgccatcatcagtaatatcaagtcatagtatgcatcttggagtcctagcaactgcatcacatgctatatccaccggaactctcttttctgttttctacaaaccaaggtttgattcttctaatcttatcattgtacctaagttcttcaccaatgctttatgtacctctagcattttcttatgtacagatgcaatgtacttcgtaataaaatatgcatgatgttatctgatatcctgagatgattccctggatgcccatttaaattttcacttatgatattgctctgttgagtgcttatagaattatatgtaacttttcctcacagaattacattccattttaggaatatatttttgtgtgagtttgtttgataggtcttatttattttcttgtgctaaacatatgttgtaccattacattctaataagtcagtgtttgttcatctaatttgggtttcagaacaagtcagtctgagtttgttgtgagtgctaacaagtaccttgaagctaaaaacagcaagatatctgttggaatgaggtttaagatgagattcgagggcgatgaagctcctgaaagaaggtaatttaacgtctattttccatccactggtttttcattggttcaaaaattgtgtgggcacatctcataaatatttcttcatggtttataggtttagtggaacaattattggtgttgggagcatgtcaacgtctccatgggcaaattctgactggagatctttgaaggtaattaagattttcaaatttgtgggcaggatgcccttcttcctctgcatctgctttctggaacatttgaggacatatgtttcttagaaaatgcctgcagttgtgttgtcatgttttctcttgtatatcttccagaatcacaacccatgtgttcaccactgataggtccaatgggatgagccttctgtggttcctcgtccagatagagtttcaccatgggaactagagccacttgctgtgagtaattcacagccatcacctcagccaccggcaagaaataagcgggctcggcctcctgcttcgaattcaattgctccagaactacctccggtcttcggtatgtttttactaagatattgctacagattgtgcttctgctttaaggtgatagctagtactgttttagcaatagaaaccttgcagtgtactgcttgtctgtctcttcaattgctgtctgctttgcatgtctaacctcttctgttcctaacttaggtttgtggaaatcttcagctgagtccacacaaggcttctcattttcgggactacagcgaacacaggaactatatccttcaagccccaatccgatcttctcaacatcattaaatgttggattcagtacaaagaatgagccatctgctctaagcaacaagcatttttactggccaatgagagagacaagagccaactcttactctgctagcatcagcaaagttccatctgaaaagaagcaagagcctagttcggctggctgcagattgtttggaatcgagataagctctgctgtggaagctacatctccactggctgctgtttctggtgttggtcaagaccaaccagctgcctcagtagatgctgagtctgatcagctctcacaaccatcacatgccaacaaatctgatgctccagcggcaagcagtgagccatctcctcatgagactcagagtcggcaagtgaggagctgcaccaaggtaatgagggttatttttgcttgcaatactcaatatcctcttgtggacagcggagtaattaataattggtcttcttgcaggtcatcatgcaaggaatggcagttggaagggcagtggacctgacaaggctccatggatatgatgatcttcgctgcaagttagaagagatgtttgatatccaaggagagctctctgctagcctaaagaaatggaaggttgtttacacagatgatgaggatgatatgatgctggttggggatgacccttggccgtatgtacccttatccctgttcaattaattacttcattttttgaattccttgagccttaactaattacatttcgattgttgccactgcagtgaattttgcagcatggtgaaaaggatatacatctacacctacgaggaagccaagcaacttactcccaagtcgaagctgccgatcattggcgacgccatcaagccaaacccaaacaaacaatcgcccgagtctgacatgcctcacagtgacctggacagcaccgcccccgtcaccgataaggattgctgaatgctacctggccatatttcccttcagttttttttttccatcttgggatgttgagcatgggggccaatgcccatgatccttgggacttctaagagttatccgctggttggttcgtgggcccgaaggacaccgtctgcatctaccatggttcatgcatcatgcatagctgcccctggaccagtgtggatcccatgccaggaaggatggctggggaggcagcatttccatcacctggcattccctgcgtgattggcccatccgtgtttaattctgctgtgtgggggtagtaggagccatggcatcctttgtccagtgctcagttttggtaaagtggtgactggtggtagacctgcaagaacggggcccgggcctcgccatctctcgctgcaccagtaaatagagtgtcaagcattcatgttcctttcttcctgcaatgcatggggtatcatcatccgtagctaagcatcagttcttctccccccccccccccccccttgcatcctgttcgcagttccggtgccgccactggagctgttcgttttaacccaccggcattccttcttttctttttttttaccgggtggtgtttttgctttcggaagtcggagcatttgctaagtttttttttcctacgctgtgctttcctcctgctgaatgtacctgtgcttttcctcctcgtggaagccatccaaatctatgacaattttctgtactcacttacctgcatgtacataggaatggaaatggaactggactgaactgaacctgatatgccgcttctcatcattgtgatgctgttctttttctgtgatagtggagttctttttctgctgtggcgtgatgggggtaatctgcgtgccaaggcctttttgtttccctttgttttgtactagtggagaatatgtctttatggctaatctgtgatgatgtgctcatctcctgacataaggcaaggcttgctctgcctgtcggaatgattgttctgcgtgccaatgccgtgacctccaaacgtgtttgctatggatcgtgcgtgacctttcgcttttgaaatcccaaacgtgtttgcttagatcattccgtttcgaggtgcggattcttgtgtgttcagatctttgggcttgcctctgtcccagaatatctcaacttaagataggatgtcacatataatctctttgtcgaaattaggttgttttattttaggacagaacagatagcttgtactaacatattgacaaaacactttcgaaggggaatgaaaagagctaaagaaatggcatactttcagaagacactgaagcccataggcaaaacagtcgactgtcagttgcacgtaaacggggggatttggccatgtgctctttcgtacatgcagactttcactgaacaggttacttgtttatgaaagttggaagtgccaaattgatcaattgcccaaacgaaaaacgatcagagcttctgctaaatcaatttcctaacaacacacaagttaggatgggatctgaaattttgtatgaaccatcaccattatttctgtctgaatacagagattagaccatttacccatctataacctgacatctttatacgctcttaatgagcatctaaaatacagatcgccacgacatggtacatcagcagaagccttatttcttcgttttacaaggccggcaggttgtgcttggagacccctcggcctctacttggggctcagtggttactctgactgatgtctcttcgttttcttcagcttgatgcgttggaccctcactaccttgttgcaatgtctgatcctcctgtcgcgtgttctcgtcaatgcggccctcctgatactgtacatccaaagagctgttctcttcaacggtctgtgcttccaaatccactggatcaatgctggcggttttgggggatggaaggagggatactcgacaaagagggcaagtggtgtttgtcgagagccagtggtcgatgcaatcgatgtggaaggtatggccacaaggaggtattctctggagccgctcatccggttgatagtctgctaagcagacagagcatctgtcaagaatgattgtatgttcagaacaaaagaaccaattcagggtaaaatgccagtactcagaagacagaaaacaactattctagtttaaccaacacacaatcttaactcagctatgctatggacatatattccagttgacaaatgtgaaataagaaagtctcaacgaaagcctttaagccatatggtaattgcaaataatatactatctaccgtgttaaaggtaccatgccaattgtagtggtttgctactgatccatagtttctctgagcaacagagaaaacaattctacacactgatcaaataccacaataagggtcaaacatttgagtaaattatctgtacaaaattcaacattattctggaacagactaactctgagtgacctacaggttgctccatatgcataagatccgtaggatgactcgcatgtgattttctgtattcaagtgctttcttctttctgtcctttcctccagactaattctagttatttaccaaatttgaaaaccgtgattgttaaaaaatattagcacttgggctggatcttgccttcctgtaattcatgtacaattctttggtattttggggatgagggttgggggtaatattggaaaccttactaatgtatgttctttcagtttttttttttgagtgcatattagcccatgtgaacctctgaaagtctgaatcaacaggcgattttgatgtacattcaataagttgcaatacatatgttaccgtgtccaaccagtgcactgtttatgcatatccattatgatatgaccatataaccacataactattgacaaaataaaatccttggcaataattcggcaaatgataatatgcaaaagaatttcacctaagctcacgaatactctatggcatctcttctaaagaaagtccatcagaactttattcaagcctaattttacacattactaggattttacacattgttatggaaagctggaagcaatacacccatcaattaagcttaccgaccttgcaccaattttgaagaatttccaaatattggagtatttgaataactttgttttgtccaatatattttctaactgcgcaagtggcacacatccactataacgttagcaattaactaactgcatatatggttcagggcctcagggcattgatatgcttgctattgcccttcggaaacattctctaaatgtagctcaaggctctaatttagaagcacttccattcattactgaactaattattgagatattggtggtccagacccaacggaaaacctacatcgaagtgctttcatgattttggagcaataaaaggtgcaacacatattaatggaagtggttatcaattgagaaagatttatggtctagcacaacagtatatgaactgcattgaagagagattaggagtagatcactgactgtgtttccctgatcaagaagctctccttgaagaccacaacaggcaacatttcccgcatctccttctttatgccgcactccaactacgcatatattcaagacaatacagatcaaacaacaaaatccccatacactaacatatcctgaaaagccaagttactcaacagaagggcgcggaggctagcttactctggggttatctccccgtatcaagttattagtcctcatgcgcaaggactgccagtttgctctgcgccgtcgcaagtagaacaagtagaagaagagaagcaagacgaacgtgaagaaaaccggcacggagaagatgaaggcttggtatagcttaagctcaggcgatgcggccgagcagtaatcgggcgggtctggggaggtacaagacatcaccaaacaagaacctccctcccttccaccaagaaccaacgaatggtcgaccgaattatcgaaaaccctaaacactcacaagatctcttatctataacactgatgagctatagtgcttattaccaaattgcatgggcttaaccaccgcaccttgattccctatgattgaattacaaaatgcattgcaagaattaagtgattgatgaccgcttgcgaagagatggaccttagatactactactactttgatagtgatgtgcacgccaccaaacaaaaaatgagcaaactgctatgggaggtagagtagggggaaagtgcagcttctttgtttgggtttggtttccctaagtcaaagatagctgaaaactaaaactcaattcaatagcgccaatcgaaagcaaaacggggattcaggatttcatggtcaaccacgcgagaataagcagcaagcagcagcagcctcctccaagctagtacaacaacaacaacaacaaacacacgacaacacgagccctagtctccctacacgtaatggtggtaaaaccacaccaaattccccgcgaagatcatgtgtgggtggaccgagggagagagatcccagccgctaggatccacaattccacagcggtgtgcaagaaccctaaccccccgcaccgcaaccgaaacagcgaggtaagggcaacagctataatatcacacgcgacggggattccagcacaaagtcagatcgcgcgatccggaggccgccggccggagcgccggggggggggggggggggctaccaccacgccggcggagaggagttccgtggcgggggtcagggcaagagcagagaggagggggttttgggaatgcgcggcggcggcggccggatcggggcgggcggtagggacggagttgggctcgcgccgaggagtgtgcagcagcagcagcaaatgatgggaaaaaaagaagcggctttcacacgcgtgcgtggctgcccggatggatcacctttttcgtcttccgtgtgggagcgagaagacgcaaactagagaggaggagatgatgcgaggagagcatggagcatgtgcaattacttctagacctagaattcaactaaacaattttcaacttcaccaatttctaaagctaaatttagaagttgtataactttactaaacatccataggattaataattaactaacgttcctactatttcttaaaatttataatgagagtaaaccatataaatatttcttttattaaggaacaacacttgctcactcatttctacgaacacaacttatctcgatgagcgcttatattctacgcgatacacaatattttttagcatatgtacatatgatgtctgatgagaatattcgtcaatcagagagaggtatgagctcttgtgagcgcggttaccatgataattcgtatggttgttttttattaatttaaattcagctggaggatatttgtgctgaatggtcagctagccaaaatgatttataataattatttgaggataaaaataaatgaattaactattataaaattttaaaaatgattttttaaaatattttaagattatatatcattcatttttgttaaaaatacgagctcaataaacgtgcacattcatttcggtcattagaaacgaacatagccattacttttagtcattcgttttaaagtaaagagttgcttttttagcaattgcgcaagacgcatggcgtacttatattagttgaagcgtaaagagttttcaagcgtggtagagaggtaatcttaggacaaagacacgtcaccgcaccttgagtggaatcacaagtcaaccatcgattaatacttcacaccaacggtcacctagagggcatcttagagcgggtacaatagtaggctataagccagttacaaacatattttaagaagataaataaaaagagagaagaacagcgggctatagatttgtagccagctgtagcatgaactccaagacgcagtgtgagtatgacaggtgggacaaggtattaatagtatagtatgtaactattgtatgactgagctattagattggctatagatgaaatggagctagtagttgtctatactattaaacttgctcttagggcaagtttcatggtagaggcacatctaattttatactccctccgtattttgtattttaatgtatgacgccgttgacttttttttatcaacgtttaaccattcgttttattcaaaaattttgtgcacatatgaaaatatttatgtcatgcttaaaagacatttgatgacgaatcaagtcataataaaataaatgataattaagatgaatggtcaaacgtttgattaaaagtcaacggtgtcatacattaaaatatggaggtagtacatgatatacatcattaaattaagaggtaacatgtataataggttgcctctaccccacaatctccaatatctctaagagcatgtacaatagcaaactattagccagctataaacatattttaatgagataaaagatgagagagaagagcagcgggctacagatctgtagccagctgcaaaatggactccaagatacgatgtgggtataacaggtgggaccatatattaatagtataataagcatctattgtatgaattgtctattacattgactatagatgaatatgagctattaaacttgcccttacatgagaggtggctatttctctctcatctttcttctctcttccacatcataatttagtcctacatagtatcctgagacttgtgtttggatgcccatagtacttgccctcatgtaatctactctccaactacgcaatagagatttaaaatgtgtaactaagctcacttcatcctttttaggctcagttcttttcttttcagccactggttagtactatctaatcatgagaatatttttcaaacagttaaatgatacgatttgtgtaaaatatttatatatataagtctcttttaaaagttatatttagatttataatagttaatatttaattaattataagataatgattcaactcgttttatgtgtggctgttagaatcaaggaaaaacgctccaacgaaggcagccgacaccgtccagttttgtaccatgcattttcctttaaaagaaaaacactactcctcaaaatcaagcaacgtgtatgaattcctccttttccactaaatccatgtactctctccgtctcattttaaatatagatgtaaattttcatatccaacgtttaatcgtccatcttatttaaaattcttttataattgttattatataataaaacataaatagtactttatgcatgacttaattttttaattttttttataaattttcaaataaggtggacaatcaaacgttggatatgaaaactcacatctacatttacatagaacgaagggagtattctttttcaaaaattcagaattatgatcaagttctcgtgtatgggctggcccattggacggtaccatcgagaaggcccattgcacctgtaagcctgagcccaactgcaacccatctccgccttccatgcgggccccccgacgagagagagagagagagagagagagagaggaggcgagagtgattgaatcggcgaagcctttcccggcggcggccatgtcgacggcggccgctgatcccgccgcggcggcggatgcggcggtcacgaggaaggagaggcggagggagcggaagaaggagcggcggcgccgggcgcggagggaggccgcggaggccgctcggaaggcggctgaggcgctcgcggccgacccggaggaggagcgccgcctccgggagctcgaggaggccgaggccgacgcgtccgagcgcgcgcggcgagccttcgaggacgcggagcgccggtggctggaggccgccgccgcgcgcgccgcggagaaggccgcggctgcgagagaggagtcgacggctccggaggattcctcccgcgaggtgatatgctgctctttttttttcccgattcgtaaacctcttattccttagctttatccacagagtaaatgtatttttagcgggccgtttactcaattattgccctaattccttcgcaatgtttaccgatcaatgtgcttggcttgtacttccatgatgacctcgtacgtctataatttctagtagaaattcatgggacgatgcaatgcgatgaagctttcgtcgtgaggagcaaatggactagcaataacatcatccatacaatgtttatagttgttactttttttgggagtgtaataattgctgcgtaagtttgtgggttccgtttagccattccatctgtttattcacattttttgggtgcatttccgtactctaattaaacttggatgaacatgtaatatgtggttctgattataatgttatgttaactattgcagtataaagatgaccatggaaatggaaccgaggaggatgacgaatgggaatatgttgaagatggaccagcagagatcatatgggaaggaaatgaaatcactgtgaagaagaaaatggtcaaagtaccaaagaaagccaaggaaaaccagccaattcaacaggtccaacttctatgaaggataaactcatctttattttttccccttgccctaacatcgaaaaaaatttaatctgaaaagggcatgctaaatatcttgcaggaagatagacctacatcaaatccactcccaccgcagtctgtagcttttgcttcgcagaggatggaaccttccttgtcagctcaagaagtacttgagaaagttgctcaagagactccaaattttggaacagaacaggcaagttccatgattctctttcaagttggacagggaaagttgtacttctattgccgcattagagagaaaatacacttcacattatactcaggccttcctttgctctagtgtaaaattactgcttattcctgtgtaggataaggcacattgcccatttcacctcaagacaggggcttgccgctttggagtgcgttgcagcagagttcatttttatcctgataaatcatgcactctgctcatgagaaacatgtatagtggtccaggccttgctttggagcaagatgaagggcttgaggtttgttagaggacaatctcttgcgattggtatcctgacaattgtttgttttgacaaagcatttcacgcttcttcagcttctctttaatggactgctctttttatgcgctaaagaatttctgctccacctactactggtttttatgattatattttttaatactttgactgtagaaaaacactcattcaaattgtaaagtgtatctctctaaataaccatgatagaaatactgactactttaatcatttgcatttcattctttggtgagatgaagatgtttcttgcccttcaggagtattttcttgacttgttgactattctcagacctatgacagactgcaagttctttgatgtatcactcttcagaactccgtctcaaggcaaacagtgaccaaatcagttggttccacttgattgaggatgtcctgaactttgatctgctcctgtatcctatattaacatgcctgtgttgttggtgctaaggtttttatgtgttttgatcttttgaaaatatctacgtatctttcaagttctgaatatgtcttgggaattattcatgaaacatctccttgacaagtcagtagtatttcgacattttaaacacgctgaactattaaggagttgttcttttattggaggtatttgatgaacattagggtggaaggtgaatctgtttttaacctttttggatgcatatgaattagtggtggtgaactaattcttatggagatatctaatattaattttcacctttacccttgtgcattttgttagttttaattcacaatctgttatttatatggtggattaatatttttttctttaacattctccagtgtacagatgaagagattgaacagagctatgaagaattttatgaagatgtgcacacagaatttctgaaatttggtgaacttgtgaactttaaggttattttttccttaccttttttttttctgatactactagatttcctctctgccaatgtttttatttgtcggaagcattacggtatttcttccttgcatagtaattgttatatacagatcatattcgtagtactacttagggttttaatgaaaggggatactatggcaatgttaagaattaccttatggttttcttagtttctagatgagaagatatattacattagcaagccatttctctattgttcaacataaggcatcatttttgtccaggaagtaccaaaagaccggttcattaaagtagtttgttctcactcctctttgttatagtgttatacactagaagtttcccaaagttctgcaaacctgagcatatgcagctcacttatatgatcactcaaagtcgaaggtcccttctgttagtactccctccggtctatggtcagttgaaacctcactgcacactaaagttttgtgaacaagtgcagtttgacctaaacgttaatttgcagctgaagtgctccctaaattatggatatctttattagttattcttcaaatgattgaaggatatccatttgaatgatggtatgctttacacacaatcacacatgcccactttatctgtggatgtgtatatgtaggtgttggttgatcgattgtgaattatatgtacaaactttaatttcaatcataattatttagtatctttttaaagatttaaacttgcggcacatttattttagatctgtcacaatactcggcaccacactagtctcataaaaatgtttccaaatattacttttaggtgtgtcgaaatggatcactccatcttcgaggaaatgtttatgtgcattataaatcattggattcagctcttattgcctacagcagcatgaatggacggtattttgctgggaagcaggtaattgttttaattcattcctcaaaggactgtcagttttgagcacagttggtacattgagaagcattgttgttaatcctctatgtctcagataatcctacactatcatattgtgctgtcaaataggtttgtttccatttgcttctctttcatggtctgaaattggaatttttttcctcgtacagataacatgtgaatttgttgctgtgacaagatggaaggttgccatatgtggtgaatacatgaggtcaagattcaaggtaccctaaaggctgaaactacagctgtctcctttactcagttgctcttggttttatttatcatatgtaggaagcatgtccacagtattgatatttgccagaggaactctctctcgagattttagcttagaatgtgatatcatctgtgtgtttttcattttctcctctcctgtttaacagacatgttcacgtggaatcgcttgtaattttattcattgctttcgcaaccctggaggagattatgagtgggctgattgggataatcctcctcctagatactggattaggaagatggctgctctttttggtccctcggatgattctatctatggcaagccaagcgacaccccacatttagagcgctcacagagttcagacaggaggagaccgagaagttctgatcctaggtacatgctacttatctgttaatcattttctttgtagagttttaatatgaatgtctagaccgagatatgctaatagcatatttttaattcaataggtacacaccaagcagaacaagggatgaagatgcacataaacagcactcgtccagagattattcacattcgaagcatgaacgcagcagccatactgagcacagacgagacagaaaagaatcatctgcatcagataagcaccgacatcgagagattaaagataagaccagcaaatactcctctaacatggaaagtgaaagagagtcccacaagtacatgcgtgaagaaaaacataggattgaccatggaaatggaggtaaaggagaccatggtaaagttaggtcgaggaagaacagatctgaacgccaagaaagtttggagcctggatcttctggccggtcttcggacttcatcgatcaagacaccaccgagagtccttcaggcagcaagtccactggcaggcatcacaagaagaccaggaggcaatccttagaagagcacagcaccagaaggagctcaaggcatcgggacatggaagatgatggaagaggacagtctgtagctgtaaaacgcaaggatcaccatgatacatcggatgatagatgggtagcaacaaacagtgatgttgattcagacttggagactcaataccagaggtcaagtagtgaaggcagcaagctgggaatgaaatatcatgctcgatcagattcagaaactgggtacggaaggtcaagaagtggaacaaccaagagccgtagggaaaggaagcgtcagagtggaaacggtgagcgcagcgacactttagaggttacttcagattcagacaccagagatatgagctctgatgcatggaggagccgatcgagaagcagtgacgagaatctctcaacgcacaggtcaaggagaaaaagaagtcgcagtagtcatgattcctgatgccattggcacgatttcttcgaagcttctcatcatctgaacactacagttgccaactttggtttgtggattatttagctagcttatgtaatagcatgttgcaaggccaaatatatttttggttcgtcttttacctaagaagagtaatttttctcttcccttcgctgatgagaagtaccttttgtttcttggttttttgagatggctccctcgatgcgttagaatagcatttaaaactgtaatatctatatgaaagcatgtattgaattaaccatagcactatgccatgttaaaaagcgtcaaaccctgtctgtcactaacgaaacgtaacacgtatctcacacaaaaaaggtgctttttcaggagaatgaacacggcaccaaaagaacgttacaaaaaaggaacgggtacacaccaaaatttcagacagaagtcagaacagccctactcatttttctgtaaacacaaaaaaggataaaagtattttccaagcataaaaaccagaggtggtgagaagaggtatcttctcataatttcttctgatgatggcagtcacagaatacaatcctgatatcgttaagcattggtctgcattctcttcctgcgctgtccctgaagatacttcaggctcctccggcactgagagtctgcctgcttctgtcctgtcctctaacgctttgttttgtcaagaacctcaataaacctcttcggaacaccgtaatgatcaacaaggtgctttgcaaggtcatcgatgactccaccttgaaccaagacctcgtgttgccctttcttacctggaaaaaatatgccagattgtaaatgttctttatcatccacaaagttctacccttgttttgtttattatcaagaaataaagaccagggataggttacaacctggaagctcagctgtggtggtgctgcaagcaaacttcttctgcagctcagaagctaacgagtcaggatccattaagaagcattccaatccagatagccgggtcatcttcttgtttccttgccttctctctgtcatgatctgaatggttcgtatggcgcccttgcgaatgaccacctcgttccctcttgctactctatggtgaatctgcattcggtttaaaaatgttgaccccaggtccctcttgtggatctcggttgggtatgctgaaccctttttgatggctcctttgtagagagcgtcgcataatgcaacatccaaaactactttggccttgtctgtttgtttaaccaaattttccttttcaacgtaccttggttcacaacagaacatgaattggtcaaaatgttaagcaaaattcacaactacacactctgcaaatatagagcctccagcaatgcacctacttccacagtaattaattacattttcctgagaaaatagttctggagacaaacctgaagactatgtcagatgcctctgatgcactatagtacttgctcgtgtccgctccaacagccataaatatggggttaacatgagagcttggcttataagtttctgctacttccagttgcttcgtgctgctaccttcagcaacaacattatcatgctgtacaacaggctcctgtaccctcttttctggtttaaaggccatgtaatctggatgcccacgattgatacgaagcaacatgacttcctttttatgcttgtcttcttttgatgaaatctgtgaaaaaaaataacagaacatagtaatattattggttatcggtaaatgcttgctatgtctgatatggtatcacaggtgaagtcaacatacatcaccagttctctaaatcttacatgttatcatgaatagtatggcaacaaagcttaataaatacgttctgataaatatgcaactggttcttcaattgcgaactctattaaaaaaacggaggtcaatagagttttaaaatatgtcagaactaccatataacatccgtacaggtttgccaaaaatgacccacttcaaacacattcaaacttgcacagttcccactatgaaatagaaatctacgattacagcatgcatcgctctacataaccatgagaaacattcaaatagttcacaagtcaaacacaggaatccttatggagcaccatgtttcttatattttacttgccacacatgcaacaattcagtgaatccactaaatgcatctattgtaaatcatggacataaaggaaaccagaaaagttcaatgcactatcttacaaggccagcggaagattttgattgcaaccacttggatagctttttgtgtgatgacttcttaatatccagagtaacacctgtaggtctgcaggggagtatgtgatttgacctgaacaatgcaaaatgcaaaagataaataacaatagatttgagtgaaagaaagctaggacatgcagctcagtgaatagttgaacatattgactcttgctaaagccaacatggctaattattaaacctttgcttccttcatccatgtaaaaaaagtaacactgataacacagagcataatttgccaacataatgtcctgatacccaaaactaaagtaaaatacaattgcataatgtcctgatacccaaaattgaagtaaaatacaattgtattacaatgttaaaaagacttggcaaataatttcatgtgaagaaaaattgaatcactaaaaagctgtagaggaagtcaaatccataataattatatcattacgctgcaggggtattagatatataaggatagaacaatggatcatgagaaactggaatgactatgtatacacacataccacaatgtacttccaggaataggaaggtctttatcttttacactcgtgtgtaaagcttgcagaagacatttatctaaaagagagtcaatttcttccgtagacaaattctgatgttccctttcctcagttggttcctcagtagcattatcttcaggcaatttcacctcactcacaccagcagttaaatcttctatggcctcaacgtggatgtcatgatctgtggtatggctctcagaaacatcaactgcagcttcttcaccttcaatggtactgtcatgcatgccttctacatgatcttcagaagaatcagcaggttgagacggtgaagcataattacgatcttcaacaacaatgtcctcataaaatccttcatttggaacatagcgaccatcagcagaatccctgcaataaaatctaataatgttaacttaagaaaagctaagctcacaagtgaattcagatctagccgttgaacttgccataatgaatccttaaagtagtgagtaatccgcaaagccttgccacgtaaccctgcctttaaggcttcattactgctcatagttgtggccccaacctgcgttaagcatgtatggcaatgaaaaacttgcacataactaacagaatttcataactacaatctttttggcaaccaaaatgtaaagggaacaaaaaaagaaaagaaggggaacttacagcaattggagcaggattaccaggaacctttactgaccatggctggccaggttgaaaggaaggaagcccttctgggggtatgctaataccaggaaacatcagatcggcaccccccagtatgaagcgtgagacttcaccacccttaagtgtaaaagcaggcaacagatcgggaaccttccagagtgcataaactgcaatattttcacccgttaaactatgttctgaagaatattagattcacaaccattattgattgtaagataataagactagaactgtcccaaagcatttaacttttcaggtcaacccataacttcattaaatttgccaatgtcatgctagagtataacaactcatactttgaaacatttttggcggttcggtatcagtttttgaaaacataggctgtcatgtttttgtgtttatatacttgtttgtttggataaaacacattaaatgagttcataacatggcgtttgcctgtttggttgagatcattactaacaagcatcaatactcaatgatgacaggagttacaagttgatgccaagctcttaggcacaaagctaaatgtcactaaaaaaacatgataccaggtaagggtgcttggtatagtttggctggttctgtgaacactgcctcaaggtcagcagcaaggagatagcctttttcatccaggataagaatgaggtgcggcggctataactaggaattggctcttggtcacttatcatcaacatatggttagaagaggaaataatggtagggaatatggattcaaatttgcttgggtgcatttgcaacaaatgcattttgctgttctacaaattgctaattttatgcatctgcagactcgcaaagaatgaggatataacaatcttgttcttgcaaagaaaaaggaaaaaagaaaaaaattcaactagttacacgtcagcgtgacttaggacagcaaattttcaaagaccattattgggaagcaacaaatcttcaaatatttgaagagtattacaagaggactgggtctccagataactacttttggttaaacttagctagcaacatccaaaatgattttactgaaaactgaatcttaagatatctgatgttgttaaaatctaatatccaaacagctcgtcagttatgcaggaaaaactaatgaacacccccgcaaaaaagcgtataataactggaaatgagtaacagaaatgtccacaaatcctttgttaaggatattaaagaatgtttagcaccatatcaccttttgcttagaatacaacagtaatacaagctaccgataggaaatatagtacgacagtgagaattaccaacatcctagaataagcagtcagcctcaacaactaaccaacaagatatctacatgaaaaatatttccattaatcaggagatatcctactcgtatttaagaaatcgatgattataacagtaagatacttcactcattacaggaagcacaagagtgttttagattctctgttcttaatgagttatgtgcatacacaataaaaacacggcttcaaaaataactacaacaaaaatgatattaacaagattgagataacccaatggaaataaaagtagtaatctagaaacaaaaactacatacctgttggaaacagctcatggcctcttccatcaatgtcgaaaagcattgggaactctccctctatgccatatacaagaaccctatttgggtacttagcaactgttacctcaacctatacatacagtgcaccaaaagaagtcatggtaagcgctagaaagagacagtaggtttgagtaaaatacttgcaagtgctctctgtactaatgctagtagatttaggcaagaaggatccagtcgacacacaataaaaataatgaaagaatattaaaaaggatgtatgacatataacttcaccataatcacatgggaagtatgtcaacattccctaccaaggacagagctctaaccatgtagcaatccttgtgctaattgtggagctcaaaccatgcagtataatttcaaaacataataccgtgttacaatgtcatatttcatatgattaaaagaagttaaccaccttgggaggaaggatggcatcaaggtcagcatcagatgcttgtgggaacctttccttggcagttcttctgagcttctttttgtcagctcccgacaaacgctgtagagcctttacatcaacatgcttcttgaacatggcttatgaaacctgaaccatacattgactaggtcatctaaatgcagaaatgaacaaaaaaaaataggagcaaaaataaagcaaccgaggaacaacgaaaattagccagctgcaacagtagggtttaagttaatataggcacattggaagaagaaaatgccgactatccgcaaagaaaagagaagaaatatgcggaccttattgtactcctactacatggtaatatggcaacaaaaaccacatcacacaaatcaccaagaatattgattatgtcataactttgaaagttcaaagccatccaatatcgtcctagggatagtacaattaacctagttaaaacaaactaatagctctcatcctaatccgccggcaaaacgactacgtcccgtctttgcacatctagttcttggattggatagtagtaggtctaggagcaccaacaaaatcaaaattgctaaagcagcaatccaatccaatccacccacaataaactgtgtctccttcttctcgagttagcacaacatcccaaagaaatcacagcatctcaccaacacaagaaatagaccgcctactacggcaaaaataaaaaaaaagagggcaaacgaatcgagagagctacagaggaagagagaagagagggaggatgaggactcgtttacgttaccggcgacgagccggcggcgatcggagcggaggagggcggaggcggaggcggagagggggaggagggatcgagaaggttctggaaccccaaaaccacgccaccaagcgccgaagcggagagaggcgagacgtgtgagatagcggcggcggcgggtgtatgggccgggccggatcggaccgtacgtagccgggccttacgtgggctgggattccggcccacgagagaagcgaaaaaatatctggacacccgaagcctccgcctccacgcgcaagacgagaggaggagatgacggcggggtccaagggcggcggcggcggcgtggcagcggcgagggcggcggcggcggggccgaggacggtgctcatcacgggggtcagcagggggctgggccgcgcgctcgcgctggagctcgcgcggcggggccacgccgtcgtcggctgcggccgctccgccgaccacgtccgctccctcgaggccgagatcgccaccccggcccgccacttcctcaccgtcgccgacgtggtaacctcacctcacccccctcaacccctctccacgctctcgccgtggtgcttgcagtcgggctgtgcgtggatagcgagtgaactgtagacctaggcctttttttttttgctcgctggagatatcgaattccgctaccgtagtagcagtcatatagcggcttaatcgtgaactagaagccgatggggctctgctgattgagaatttgttgctttcctgattgagaattgtgctatgagttgactggactatgctaaatttgttcacgatttattgttttattgatcttgagtgaatcgggttgaaacaatacaacatggtatggatgccaatagaatagcttatcaatggtgcttttaattctttgtttgtcagaacaacgcctaatataagttgcctatgttctattatcttactctttttaacagttttgagttctcaagtaatgttttgtgcttctgttgtagaggtctgacagcaacatggccgagttggcaaaggcagttgtggaaaagaaacaagttcctgatatcataggttggttacattttctgctcgaaggcaaatacaggctatttggtagtagatgatcataatctgttctctttattggaatagattgtggaatcacatatttgtacgccatttcacaatatacattaaagcaatctttcaagaagtcttaaccgttgaggtttgtggcagtaaacaacgctggtacaataaacaagaataacaagacatggagcgttccagcggaagagtttgatacagtggttgatacaaatattaagggaaccgcaaatgtactccgtcatttcataccccttatgatagagaagaaacatgggattatagtcaatttgtcctctggttggggtaggtctgctgctgcagaggtaggacactgcgaactgtgtcaatgctggtttctttctttgtatgtgaaaaatttcatggatactgaactacatatcggtgtttcaggttgccccatattgtgcttcaaagtgggcaattgaaggtttaacacgctccttagcaaaggagctgcctcctggattggcagcaattgcccttagccctggtgttgtgaatactgacatgcttaattcatgcttcggaagctcggcctcattataccaatcaactgaacaatggtaattgctaaacctgtttggctttgcgctttccctcaagtctcaaccatgcttgaaatgaataaaacctgaaaaaacaataagtggttacaaacttacaatagatgtagccatatagcagtagacatgtgatggcccatatgagaccctaggaaaaccagggaatgttatatacagtgttaatacttttagcatggttcactggtgcatgaatctttctattgaatcaacttcctgagaaaattctttctattactacaccatacaacaactccatcatgcggtctgtactctgtggccatttcaatgatatctcaaatatgcctattcttctggtcctgtcgttccatgtacaccagtaagtcaaaatgagatattcttttggtacactgtttttatagaaaagccaatagttatacttaccctgatgttgcactcattcaatccaaaatagaaacctggacatccagtgcaaaccacagttggtgaatagatgccgtgcacttggatgttctgaattgcataacaagtatacaggaggttgtgcttagcccatctagtgagtagtgagatgatgaggtgtaagaaagtggctttcaatgacctgtcaggctgcgcatagcaaatgtttccagatgatcctatattcctacaccatacagatattatccttccacagccattactcatatactggtttagagtattcttgacttgtcttcctcctccagaggatatgattgttcagggttagcggcgttgcttgtacattgtcccaaatttgaggtattatacacggcacaggtattattgaagatttgcatgacaaggaaatttgaagagtatccagttgaccacatctaaaagctgtcttacatgtgatctttttctttagtgctacattgatacatttttattgcttcttaatgcaaccgacatgaacagggaaccttgaataagtgccatagctgtggctcactaatataactgtcatatgatccatgacagcttgaaatataagtgtgaagttgttggcaacactagcttttgtatgcaataactttcaggatatgcgacattgatcccattaaccagatgatgccttctctttcttctctttattttttttcagggcacccaaggcagctacgatgatactaagccttggcctagacgacaatggctcatcgctcaccgtatgatgctgtagcaaatctatatgccgaactaatctctgatgtattgagttgtagtccttaactttgaactgttgtgcaacattatgttgtagttagatcgaatcgacagtgcgctaatggctgtagctgtgcgtactgctggttcgctatctcacagtgattctgtaccgtatattgatgatgatgatgaaactgtgaatgagtatggatggcacgcgttatttctcccaatctttgccaataccccctctgattcatactataagtcgtttgattttctttctaattaaacttttttaagtttgactatgtttatagaaaaatatagtaatattttcaaaagaaaacaaacatattatcaaaattgaatgaatctaatttaatatttttaatgttattattttttctattagcttggtcagccttaacaaagtttgaataagaaaaaaagtcaaatgacttataatatgaaacggagacaaagtttgaataagaaaaaaagtcaaatgacttataatatgaaacggagggagggagtatgttttctttttctttctcgccattagttcggggacgaatcatgtacagcaatctaatcttatctctgagaaaaagatagctacaatagcaagaacagttatctctatatctctttcaaaaagaaaataataaagaaaatctaggacgattctaatctctgacaacgtcagcgatcacaagatcggctctgaaacagtggcacctacaaagaaaagggaccgtgtgtttataaatactgtagcatctctttaattagctgcggcctgaatcctgatcacactactacagttttgcttttacctaattaaccactgctcccacaattactaccacatagtgtctgcagttatgcacacagtaccactccgatctactctctcgaacttaaaataagtttatttttcacctcttcgatacatactaaaggggtgtttgggagatagacttattttagagacttattttttgaagagagggactaactttctcccaaacaccccctaatataatacagttcctcgaaaaaaaaaaccatacaattgttaaaaaaaaaccatacaattgttctccactttatctatttttaatatatttgttctagactttttcaaactccgttgcaatgatttatttgaaaaataaacttattttgagataatcaaaagagattgaaggtgaacttatttcggaacggagcgagtaataattatacccccaccatggaatcctgggctaactgatgatgtagtaaaagactgaagcaaaacagtgtggccggctggcgcgaatgagagcttaaatagcagtatgaagatcttgcagctgcagactttgcaggcaggggcctctgccggacctgcttgctttgatttgctgttttaactccgaatgtactactttgtccaggctgcccatgttatccctctcttattgttcatcctgtgcaaaatctatcacttgctctgttcaaacttgaaagcaaacgtactctgaaattatctgaataccggatatacttggcatcccatgcaattgcactggcttccattgtgtatgcatcagcaacagcagcagggctctctgtatcattctcattgactccacctcttgtgtgtcacacatggtgcttggcatctttttttgcaggttagaaatcactgcaaggtacactggctaggtctctgtacatttgtattgtggtggtcactctggtatcaacctccaattacagttgtgttgttttttctggctcctgtcgtaaaaacatgatagaatgggtgcgcagtctgatcatataatgtttagtaaagatatcacgcaaattatataaacatgccacgagtaaattatgataaaataatttcattgataccaatctactctcaatttctaaatacggggatttctaggttatcaaacaaattaaactagttatagttataggctcgtgcgttgaaacaattttttttatttagttcagtggaaggatttggatagggtgggtatttgtttttttttttagtaaattgcattcacggtgtatcaacttggtaggtgagtgtaatttagtgtaagaatatgagaaataaacatgctagtgtaacaatggtaagtgggtgcaatttaatgtaagaattttataagtgagtgtacgagtgtaagaacttgtaagttggtgcaattttggtacaataagttaagaaagtgatacaataacttaattatttcgagaattttagtcatacatattaacattttattttaacaatatactagcgtggctgtggatttgtataagtatatttaaatttttattctaataactaaaagttaattaactttactttgtagaaaaaatattatatttcgattgagatttgagaagttgaagaaaaaaaatctataccggtgggcaaattggatgcacaatgtaattattaaagattaaactaaatattttaaagtaatatatgtaggattgctatgtgatgacatattaacatcctgaaaaaaacttacctagcactcattaaaccaaaacaacacatgtttaaccaagttattgcaccaaaatactaaattaccaagttctcatattggaacgcactcacttgtcaagttgttgtacttggaacttcaattcttaaattcttatactatattacacccacctactaaattgctgtactgtggatgcaatttactcttgcttctttatactttttattttagaaatcagtttttcaaggtggatggtttttacgggaggaaagagattttaagaggaagtgggggagggggaggagggcgactccctcttttaggtgtggtagagatattaaagataaaggaaaaatccctttcaatcatctaattggttatattttaaattggtttgaaattagtatcccagaaatacttatattgtatacaaaatttgaattttagaaatgcatatatttaggaacaaaggaagtattcctttttttagaggaaaacaccttaatatatttcctcatacagaagatgatcaattcatcatgttgctttaggtgaactatttttctaacgaatcgacacttagagtgtatcaatttcattgaataaagcatgagtaaatcgagatgtccaggcatggaagaactgtaacatggaaaaaattgaagtatcaactctaacagtctttagggctgtgttcgggacctcctcccggcacgcaaaatgaaactcatattattacatgattaattaagtattaactaatttttatttgaaaaatagattaatatgattttttaaaacaactttcatatagaaagtttttgcataaatcacaccgtttagcagtttgaaaagtgtacgcgtgaaaaacaagggagttgggttgagaaaatgggaaaaagaacacagcccgatcgtgttaaggtcaaggttatagcctcttcttgattttcgataaggggttgctgctgagagctctctacgacgaaacgctctatgttcctatccttccatatttcctatgcagttaggaggatgagagtgcaaatatcatctctccttttttttcattctttttcaggcccgagccggtggccattctgggtgaactatatttatcgaaccatttcatattgttctaaaaaatgcttcacagtaaactacacagcaactgatgggcaaaaacaacttgcaatcaaagatgatcaccatacactgttctcctttctcccttaacatttaacaagattacgatatataatacgggagatccggtcaactcattcagcgtgaggtgcagagcaggtggacgtctacgtccacccacccagagagaaagagagcgaaaaaaaagaagaaaaaaaaaacacatcttgggagagagagagaagcagaagcttctccggacagttgcatcagcgtatcaaatcgagatcaggattaaaaacgacaccagatgcccactcaaatcatgcgttcccctttatacaaatgagcaaattgtggtgctactgtactgctactcttttctctctcagcaaaataatctaagtagcagtagtagtatagtaccacttaaaaacctctgaaaataattaataacctggttagaatcctcttgagaatttaagaacaaataagtaacaaatctacccctagaaagatcacatcttagctgctgctgcatgcatggctgttgaaaattatattatagctgaattaattaagaacccccatgcttagctgggatggagatcatcatgcatccaattagtccaccttagctgcactcttgcttgatgaagaggtttcagtttcggataaatccacgctatgccactgagtcttcatccatctctctttttttttcaatttttttcatcgataatgggaaattaatcaatccagccttctggatcgtcgatttgatttaatttcttgaattcatgcgcaccacagggagaggaggctgctgccattggaccatctgtgcaggagctggctgaggcacagcacggcgtaggcgagcaggatgagcttgaagatgagctggaagtagtgcgacacctcgaagctggatgcattcatcacctgcaaaaaccaaaaaacaagaaaacaaaaatccacaaattaaccaatgatcaccgcagcatatataattagagcaattttacgttacttgaggaggtatcatgatgtaccactttttctattataaatttggtacctcttggtatctaggtagtatgaggtagtatgaggtatatcgtcgtatgacatgtttgatcaaaaggttaatttgatatgcatttgagaagaaaagggatcatgccatggctagtcctgccaggtgcgacgatctctgctgctgctgctgctgctccggtgtggctgcggccgccgccgccgccttcttggccgtgttgcagcaccggtcatcgtctccggcgacggcggacttcggcctggtggcgccggagcatttccggaggcgctggacatcgttcatcttgagaggcttaaggatgaaatcctcggcaccggctgtcaagcatctgctttaaccaaaagaggacatacatgttagcgttagtggtgatgcacacacacacaaatccgacttttgaatctgaaaagctgtgcaaatcttggctttcggagagaagccacagttgcaaaagcaactttcatcaatatacaaaaacaaaaacagtatcttcagctttgcaaacgagttgattgatgatggttttgcaaagaagaggagaaagaatgggtgccaagaacttcacctgctgatcctctggggctcattctccgacgacatgaccaccaccgggatcggattcggcgaccccaacgcctgagtagattcagaaattcagatgctcaaatttacatttgaactgacaaaaacagaaacagaaaagagaatctttgaagaagtttcacatgctcttcatcgctcaaccttgatggctttgagaagatcgtatcctgtcatctccggcatgcagtagtcggtcagcacgatgtcgatcgcttgatcctgcaaagatttgtccattctcattttcatctctctagtttcagactaaatcgaaaagggtaaaaaagaaatgacaaaagattcatctccaatttgatgtggcactacgtaggcattttgcactgtacggcaacatgagtttcatcaaagaactcatcagacattcaaactaccgcactgttgctctgctagtgatgattagtgaagggattaaatttctctccgaggaacagagaaagaacagagcgagttagactttgtgtcagaggagggggtgagagagaccgagttcgttcagaattgatgaacactcctatatcaggtgatgaaaaatcaaatggctcatctgcaatgcagtgtatggtgatgggtgacgtacgttggccgccgccgccgccgccggagaggatggggtgaggtggtcccggtccccccgccgccggccgagcagctccatcgccttcttgccgctgtccacggcggtgactggaggatcgaggaaaagccagcaaacgatcatgcgtcggcggcgaggcgagcaaaggagcaaagaaccaaaagagacggtagcgctcaccgtggaacggagccgcctcgccggcggcggcgccgccgccgccgccgcagtgcgcccggagaagcagctccacgacccgcctgtccaccggcgagtcgtccaccaccagcaccctcaccgcctccgctcccatcctctcaggtctcacccacacacacgcagcagcagaagaagcagcagcaatggcccgcgcgccctcgccgcggtcctcgccgtgggagtatttgaaagaggaggaatcgcgacgccctcgcctcgccgcccgcgcgcgacgcgacgacgagagaagaagaagagaaagagaagaggaggagggagacgaggggtaggtggggcccgcgcgcgtgcggtgggacccgcgggtgtgtggtggggccggggaaatgctttcctctggatttggttgtcggggctgggaatcctcctctcctctaccctctccgactactgtacttcctgttttgatattgaagagtattttttatcagttctctatatccaaccatatatatatatattttaaaaaaagattataaacttagcttattaattaggaaacttagctctcaaataacccaacttaaaataatctcttatgaagattttaactcaagaccttgaggtgctactcagatcactgcaaccactatgctacgtgccatttcataatatacttcatgcgttacataatacttattattttaatatataataaaaattatctaaaactcataattattttaaattactactcatcacattaactatttttattttaaatttttattcattctaccctcccccaccatcacacgcccaattatatattatttaataaagaatattgtagtgatttcttttaaccttaaccttagtataggctaaacaatccagaactaattattatgggaccgaggaagttcatgctactagctcaattgctttatttttcttttctgctttattttttttcttttttaaaaataagttgtgatttatttgctgttctggcggcagaaaagaaaagggagggaaattcaagatacgcatcatcatcatgatgatcatttcatgcaatcggtgctgacatatctgctggcagccattgggtcgtgaggtagtacacacggataatgatgatgatgatgatggttattgtattggcatcgacgtggttacgaaagattgctcttggatactactactgttaattaatttccattaattacttataaaactagataggcttttcttttataacacgggattttaaaaatacgcgaatagagaaaatatagaattcaactgtgcgatggattgatgaagcctaaggcgtcacatcaaaatacatagagattcctacgaggttggatagaaattcttcaaaattattatggactaacaaaattgcatgttaacatgctaagataattttcacgattgataaaaactctaccaattcagacaactatccgtaacaagacaaataaaataatagcaaaacaaagtccgatattatatagtattgaacccggtttgcactcgcttcatttgtcatcacacgaagaatctcttatgtacaccttcacgtcgcctcacaaatcgaccaggtggctattccataagttggcgcgtgtctattattctattatacgtcaccgataaaatattgaatttttgattattcagttagtgaaagttttttacctgtaggtggaaaaaatttacaaagtaacaaacttacagcatatacaccttaataataatttcaaatggaaaatattatgtacaccttcaaatgggaaatattataaggagagaagtttagaagagaaaaaatgaggataaaagagaaaaggaggagaaaagaaaggatattggaaggagagggagaggacaatatgattgggagaaaacaaaaatgaaaaaaagaaaaaaaaaagagaaaaaagacatcaatcgggaaggggcgccagcgccaagtggaagcgtgtggaacagggtgacaggatggtgtgggtcggttgggttgggttgggttgggtagggaagggaaggtggtgtattagttattttggaatttggagtcacgttgaattggatacgggtgacatagaaccaactcaaatacggatgacgtaccaaaattttgacgaaaacatattcaattttataatagttgagatagagattgggacaatctatactaattttatatgattttatggggtcatccctttgttccaaaggaacaaatacgaaaaagttcccatatgattgaaattctttaaaaatatccaaataaggaatataatcatattattatgaaagtgatattcggcacaaatatactcagtctttgcatgtactatctaatctgaatattaaagagaatttggcacaaatatagcttttttaataaccttaataaaacatttccctatcttttttaaccttttgcccgtgccgggcaaaccttgccaaggcactatattgtcctagcacagcaggttgaaattttttgtgttcttataatgcttcaaaatctctatagaaactctatgagtatgagcacaacttcgtaatggtattggctcatggtgatgacaaccgttatgaaactcatgataggcaagttttctctggcaatgaatgatgccacttatagatagtatttttgggttgagatttaatggtgacaattagactaagcaataatgttggggaagaaaaaaaaagaggtcatgaatataattataagatcttgtactcaagtttcaaaattgtgattacgagaatattagcatgtctggatatcattcgtgcaatcgtgcacttactctacaatactcgattagaggtcaactggcatgttcagagacaaaagaatggagcatgtgcttgggtctaaggaagtcttcttctatctgcctataataaaattttaaatttggactctacattaacacttaatatgtagtggaccataaagcaccgatgatgcatatgatattgtacagtcatgggtgcatgacttcacccgtcaagatttaaatcctagtgcccgtaaatattacatctatgcgtatttaataggattttagtaaggctaggaatttacccgcctatatatttttacctatatctgcttctttgagttgtgttaggggcgtatgcacgtgtatgtgaatgatgtgtgtatgcagtggtgcacgcgcatatgtgtcttctgtgtaattgtaaaaaaataataataatcctggtatggatatgaatacgagtattttcttcgtatatgaatatggtattggagtttttgacggatacatgtaataaaacagatatcctatgaacattattattcggatatccgttgaaggtatgaaacatattccatttcttcctaactctaaaccttcaatctaatctttagattttaatagtagccaatatctagctcacaacactggctcatactattaatattatttaaacttttaaatatttttacaaataatattatatgttaaaatatcacttaaacatgcatttataccggtaacgttgtacgtattgatcttgattggcattgtttagtccacaataaaactttttacatagaacgagctaattatgtatgatggtatttgtctctattataaatttatgtggttttcatgtttagagaaatatttattttcgtatcattttcgatcattatttgtattcgatataattcgtaatttttccgtatctgagctagtcatattcgttgacgtattaacttaaaagatatgaaaactgatatgataggagcattatatatccgtatcctctcagttttcatcaatgaacatgtaagttttggcacatgtggcaatgacttgcttggccttgaaaaagcagggggtacaacaccgggggtgcatggagcggattggatcaccgtggcgtctgcgatccgacggtcgtgatccatcgccgtcgcgagattccctcccctatttttgtgtgggggcgagatctcccgtgggccccacgtgtcggccccacggctcacctccttgctgctgcaaatggaatgtgacgcttacctttggtgggaccccggtgcatatactgctccgtgcaccagaaacagatgtatctgaaaattcccccattgacagaaaaaaaaagaccttaaaattgccacctttgttttcatgtagtactactatacttagttacatgatattttgtatcagtcaggtccatataattagaaatagggtaggagttcataagttaacaggttagacacgtataattagggagggacggtgattacttttcacagaggatggaaggagagtgacttcttttagcttttaagatagtgcaaatgttgttttttttcccttgatgtataatattatggtaaagaaaatgctgaaaagattagtatttttattttgtgaggaaaaaagtcatattattttgcaagaaaaaaaagggggaatttagtttcttcggatcaattattataccgttcagagccgcagaagatttatacataccatgcaaagtagatgagcgacttaagaacgcctcctgacatatgtcgtcgtcaatagtgcaccttgtgtacgaatcactatgctacgtacggcacccctttcagattcgtttttcaggatttattctactccatttatacttgagctaatgagagctcttcattaaggtgacagtcgagtgcacaggaccaaaaacatcgacattttatgatttgccactcaatttgtagaatttaaatgttttcttggtcgcctctttttctttcttcattcggttactgtcttttccacaattaattatatacatgcttatcaataacagttaaggcctcccttggattggagggttttttttaaagggaaaacggatagttctaattccaaagaaattgagtacatacatttggaataaaataaaataccaaaggaaaagtagagagaggaaaatacacaattgatttcataggaaaagtacatgagaaaaatagatcatccagggctcctttaaaacgcatgattgtaaaaacacatgaatatagaggatgaaatattaaaatgccatggtctattgattccttaaggttcgtaaaacatagaaatgattgtaatatgttgtttggatggttccaaggaaagagtaaggaaatttgggccaagttctccgtgtgattggacctctggttagaaatcctctaaaattcttgtgaaataaataaatccattgcaaaaattaggagagtaatttctttgttccaaatgggcataaagttattttttcacaggattgaaataattcaaaatccctacaaaaatcctctgttccataagagtccttggacttcttttttctcttcccatcgcataagaccgaggtaaatttcatatagcacaaggttatcaatctgccattttgtgaccaattgccaaggctaaggggtggaaaatttgctcaagaaataagagtatcgttctccttctagaattcccattttctttttattcctatgttaatctagcaaaattaatgtattttatgattcaattctctcatattcctgtatgtttgtttttctattcccataatcctacgttttctctacattccgtttcaaagcagccataagtcctaaattaagggcctttttggttcacagaatttcctaatcaccaagaataggaaaaactaaaaatgagataggaatgtacgtgcaaaataaatgattggaacacatgaatttttccttcaatgagctgaataaaagatgatggattggatgtttcatttctatggaatcggtatattttggaggattaacatagtgttcctatgagaaattttcctttgaattctacgaaccgaatacataaatagtgtttattccaaagaacttgagatatccttagggtatcctttgaaccgaacaatgcctaatccttgaccgtggtggcaagcgtcatgcgttcttatgtgattgggaaaaatctctactaattaattcaaaacataaacataaataattatatattactctcttcgtcccattatatagccacctacgataggatgagatgtttcatcgtacaacgaatctagacaaaagatatgttcagatttattatactatgaaatgtttcatcccagctgttatattacgagacggagggagtaatagattatttgtccactgctttcgtatttttatcggtagcactggcacatgggctcccctcaagctctatggcctcattcagaggtcgcatcccaaaatcttttcagcaatatttttcttcttttgcgagatcctcgtgtgatcagcaacggattaaacaaatgagatgattggatggcaatctccccaaatcccaacggctcgctataaaattcccccaacttgctctcgcttcagacaaagcaacgggattttataaaattcaggtcctgagaagtttcttgtactccttttcgcaattattctaaaaaagatagtgctgctgcttatctgtagtcaaatccatcattttaagttattaagtaaacatcaccctttatgtttatcgcaattcttcattaatttttacaagcatagggttttacgaggtactcaatgttcacttcaaaggttatggggggagattttggcctgtagctactctcaaaatctctagtcctcccaaacaatctagccttctttttatctagattttacaaaattgtagttatagaattagaaaataaactcgttttacctctttagattctataagctatattcacaccagttgtttcttagaatttaaaagctctttcaaataggccttcaaatataaagggtaatagttttctacacgatatctaacattgtgtcagggttacggataatgtataccctctacctttggatatatgatgtataccgatatggtatacctgcgcgtatacagatgtttcctgtacacgttaaggaaattcatagcataacagaaacggagtccacagatgcaaggagtcctactcggacagaaccgggtgttactgtatcgtgtggggtccgatgtctccgagttctatttggagaccaattgacccgcggtataaaagggacccccgggaggacctaaggcatcgaatctcaccgccaacacaaccaccacagcttacgaagtcggagcctacagaagccaagtcgccgggtgatctagtcgaaccaactcgactacggtctcgtcggtatcatcgagttccgctattccccttgtaatatgtagtttccattatataatcccatatcaactggattagggctattacctgtcaaggggactgaactagtataatccatgtttcctgtttgcttgacgttatactacgtagatccgtaccagcgtatcccaataccctctatatccggtctacggatatcccccgtcgacacattgtacttcgaccattaatttctaaaaatatatattatcaatataattaatatcatatcaaaatattttcaaatacaatctaatagtaccacatgcacaacactaaatatatacatgtattgttagttataatttttaagagttgatctttttcccgaaaacaagagcgtgtattttagaatgaagcagtatcttccgttcagccaaatgttagacatatgaatggctaagtttaaattctactacacgtcacgaaaaagtccaaaacaacttggggaaaatattttgattaattcctcgagaggatgtctcccatttgcttaaaaactatctaaacaattatgaaaaattctgaaaaaatttgacaacacttatacaactccacaaaatcttaagtccaaactcaacgagatataaaaaagataaattcagcgtatgaatagtagcgtactgctcctatctgattggtgaaaccttgcacacgttccgttaggtgaaactcatccaaattgagtcatcgatccggagtggctttttctttttccgaatcatttgtatgctactccatccgtttcatattataagactttttagtattgtctatattcatatagatgttaataaatctagataaatatatatgtctaaattcattaacatatatataaatatgggtaatgttagaaattcttataatatgaaacggaggaagtaacactaaacagcatgtggttggatcatcgatgcatgcgtgtgtgcagcgtgcacgcatgcatgcaaagctggaagcacaactgcaaaggggagatcggcaattgtgcacgcaggcgtgtcagctgcagttcatcgagctaccgactttaacttcgccggatgaacagctccagaaatcaatcgcctccatccgctgcttcaacgagaataaagacgacgctgtatgccagaaatcaatcgtcagttcaagctcaagcttttggaagaatgggaagccataa
